United States Patent Application Publication US 2026/0176601 A1 - sequence listing, part 2

SEQ ID NO: 1307 - DNA, 2538 bp, synthetic construct
  misc_feature 1..2538: note = DNA Polymerase Variant
  source 1..2538: mol_type = other DNA
atgcaccatcatcatcatcatggcggtagcggcatgttaccgctgtttgatttggaagaaccaccaaaacgcgtgctgcttgttgacggccatcatctggcgtatcgtaccttctacgcactgagccttacgacctcacgtggtgagcctgtccagatggtgtatgggtttgctcgctccctgctgaaagccctgaaggaagatggtcaagccgtagtagtggttttcgatgcgaaggcaccgtcgtttcgtcacgaagcgtacgaggcctataaagctggccgcgcaccgaccccggaagactttccgcgtcagttagcgctcgtcaaacgcctcgtggatttgctgggattagttcgcttggaagctcctggctacgaggcggacgacgtgctcggtacactggccaagaaagcagaacgtgaaggcatggaggtctgcattcttaccggtgatcgcgatttcttccagctgctgtctgagaaagtgagcgttttgctgcccgatggcacgttagtaaccccgaaagatgtgcaagagcagtatggagttccgccagaacgttgggtggactttcgcgcactgactggtgatcgttcagacaacatcccgggcgttgccgggattggtgaaaagacggcgctgcgcctgctggcagaatggggctcggtggaaaatctgctcaagaaccttgatcgtgtgaaacctgatagcttacgccgcaagatcgaagcccacctggaagacttgcgtctgagtctggatcttgtacgtattcgcaccgatctgccgttggaagtagactttaaagctctgcgtcgtcgcacacccgatttagaggggttacgcgcgttcctcgaagaactggagctgggctccctgctgcatgaattcggtttgttgggcggagagaaaccgcgtgaagaagcaccatggccgccgcccgagggtgcctttgtcggctttcttctgtcacgcaaagagccaatgtgggcggaactgttagctcttgcagccgccgcggaagggcgtgttcaccgcgcgacctctcctgtcgaggccctcgctgacctcaaagaagcacgtggtttcttggcgaaagatttagccgtgcttgcattacgcgaaggcgttgcgctcgatccgacggacgacccgcttttggtggcttatttgctcgatagcgcgaataccaacccggaacgtgtcgcccgtcgttacggcggcgagtttactgaagatgcggcagaacgcgcgttgcttagcgaacgcctcttccagacgttatttccacgtctttcggagaaattactctggctctatcaggaagtcgaacgtccattgagtcgcgtgcttgcccatatggaggctcgcggtgtgcgcttagatgttccgttgttagaagcactcagcttcgaggcggcaaaagaactggaacgtcttgaaggcgaagtctttcgtttagcggggcatcccttcaatctcaactctcgcgaccaattggagaaagtgctctttgatgaattaggtttaacccctgtcacgcgtacagagaagaccggcaaacgttccacttcggcagccgccttggaagcacttcgtggtgtgcacccgatcgtcgagttgattttgcagtatcgcgagctcagcaaactcaaatcaacctatcttgataggttacctcgtcttgttcatccacgtacgggtcgtttacacacccgcttcaatcaaacggcaacagccaccgggcgcttgtcgtcgagtgacccgaacctccagaatattccagtgcgcacgccgctgggccaacacattcgtaaagcgtttgttgcggaagaaggttggttattacttgcggccgattactcccagatcgaacttcgtgtattggcgcatctctctggcgacgagaatcttaaacgcgtgtttcgcgaaggcaaggatattcacactgaaaccgcagcctggatgttcggggtggactcggccttagtggaccccaagatgcgtcgtgccgccaagaccgtcaactttggcgtactctatggtatgtcagcagcacgtcttagtcaggaattgggcattgactacaaagaagctgaagcgtttatcgagcgctatttccaatcctttccgaaagttcgcgcgtggattgaacgtacgctcgaagaaggtcgcactcgcggctatgtggaaacgttattcgggcgtcgtcgctacgttccagatcttacgtctcgtgtccgctcagtgcgcgaagctgctgagcgtatggcctggaatatgcctgttcagggaacagcggcggacctcatgaagatcgccatggtgaaattgtttccgcgcttgaaacccttaggagcccaccttcttctgcaggtgcatgatgaattggtcttggaagtacccgaggatcgcgcagaagaagccaaagcactcgtgaaagaggttatggaaaacgcgtatccgttagatgttccgttggaggtcgaagtgggtgtaggccgtgattggcttgaagcgaaacaagactaatga

SEQ ID NO: 1308 - protein, 844 aa, synthetic construct
  REGION 1..844: note = DNA Polymerase Variant
MHHHHHHGGSGMLPLFDLEEPPKRVLLVDGHHLAYRTFYALSLTTSRGEPVQMVYGFARSLLKALKEDGQAVVVVFDAKAPSFRHEAYEAYKAGRAPTPEDFPRQLALVKRLVDLLGLVRLEAPGYEADDVLGTLAKKAEREGMEVCILTGDRDFFQLLSEKVSVLLPDGTLVTPKDVQEQYGVPPERWVDFRALTGDRSDNIPGVAGIGEKTALRLLAEWGSVENLLKNLDRVKPDSLRRKIEAHLEDLRLSLDLVRIRTDLPLEVDFKALRRRTPDLEGLRAFLEELELGSLLHEFGLLGGEKPREEAPWPPPEGAFVGFLLSRKEPMWAELLALAAAAEGRVHRATSPVEALADLKEARGFLAKDLAVLALREGVALDPTDDPLLVAYLLDSANTNPERVARRYGGEFTEDAAERALLSERLFQTLFPRLSEKLLWLYQEVERPLSRVLAHMEARGVRLDVPLLEALSFEAAKELERLEGEVFRLAGHPFNLNSRDQLEKVLFDELGLTPVTRTEKTGKRSTSAAALEALRGVHPIVELILQYRELSKLKSTYLDRLPRLVHPRTGRLHTRFNQTATATGRLSSSDPNLQNIPVRTPLGQHIRKAFVAEEGWLLLAADYSQIELRVLAHLSGDENLKRVFREGKDIHTETAAWMFGVDSALVDPKMRRAAKTVNFGVLYGMSAARLSQELGIDYKEAEAFIERYFQSFPKVRAWIERTLEEGRTRGYVETLFGRRRYVPDLTSRVRSVREAAERMAWNMPVQGTAADLMKIAMVKLFPRLKPLGAHLLLQVHDELVLEVPEDRAEEAKALVKEVMENAYPLDVPLEVEVGVGRDWLEAKQD

SEQ ID NO: 1309 - DNA, 2538 bp, synthetic construct
  misc_feature 1..2538: note = DNA Polymerase Variant
  source 1..2538: mol_type = other DNA
atgcaccatcatcatcatcatggcggtagcggcatgttaccgctgtttgatttggaagaaccaccaaaacgcgtgctgcttgttgacggccatcatctggcgtatcgtaccttctacgcactgagccttacgacctcacgtggtgagcctgtccagatggtgtatgggtttgctcgctccctgctgaaagccctgaaggaagatggtcaagccgtagtagtggttttcgatgcgaaggcaccgtcgtttcgtcacgaagcgtacgaggcctataaagctggccgcgcaccgaccccggaagactttccgcgtcagttagcgctcgtcaaacgcctcgtggatttgctgggattagttcgcttggaagctcctggctacgaggcggacgacgtgctcggtacactggccaagaaagcagaacgtgaaggcatggaggtcatgattcttaccggtgatcgcgatttcttccagctgctgtctgagaaagtgagcgttttgctgcccgatggcacgttagtaaccccgaaagatgtgcaagagaaatatggagttccgccagaacgttgggtggactttcgcgcactgactggtgatcgttcagacaacatcccgggcgttgccgggattggtgaaaagacggcgctgcgcctgctggcagaatggggctcggtggaaaatctgctcaagaaccttgatcgtgtgaaacctgatagcttacgccgcaagatcgaagcccacctggaagacttgcgtctgagtctggatcttgtacgtattcgcaccgatctgccgttggaagtagactttaaagctctgcgtcgtcgcacacccgatttagaggggttacgcgcgttcctcgaagaactggagctgggctccctgctgcatgaattcggtttgttgggcggagagaaaccgcgtgaagaagcaccatggccgccgcccgagggtgcctttgtcggctttcttctgtcacgcaaagagccaatgtgggcggaactgttagctcttgcagccgccgcggaagggcgtgttcaccgcgcgacctctcctgtcgaggccctcgctgacctcaaagaagcacgtggtttcttggcgaaagatttagccgtgcttgcattacgcgaaggcgttgcgctcgatccgacggacgacccgcttttggtggcttatttgctcgatagcgcgaataccaacccggaacgtgtcgcccgtcgttacggcggcgagtttactgaagatgcggcagaacgcgcgttgcttagcgaacgcctcttccagacgttatttccacgtctttcggagaaattactctggctctatcaggaagtcgaacgtccattgagtcgcgtgcttgcccatatggaggctcgcggtgtgcgcttagatgttccgttgttagaagcactcagcttcgaggcggcaaaagaactggaacgtcttgaaggcgaagtctttcgtttagcggggcatcccttcaatctcaactctcgcgaccaattggagaaagtgctctttgatgaattaggtttaacccctgtcacgcgtacagagaagaccggcaaacgttccacttcggcagccgccttggaagcacttcgtggtgtgcacccgatcgtcgagttgattttgcagtatcgcgagctcagcaaactcaaatcaacctatcttgataggttacctcgtcttgttcatccacgtacgggtcgtttacacacccgcttcaatcaaacggcaacagccaccgggcgcttgtcgtcgagtgacccgaacctccagaatattccagtgcgcacgccgctgggccaacacattcgtaaagcgtttgttgcggaagaaggttggttattacttgcggccgattactcccagatcgaacttcgtgtattggcgcatctctctggcgacgagaatcttaaacgcgtgtttcgcgaaggcaaggatattcacactgaaaccgcagcctggatgttcggggtggactcggccttagtggaccccaagatgcgtcgtgccgccaagaccgtcaactttggcgtactctatggtatgtcagcagcacgtcttagtcaggaattgggcattgactacaaagaagctgaagcgtttatcgagcgctatttccaatcctttccgaaagttcgcgcgtggattgaacgtacgctcgaagaaggtcgcactcgcggctatgtggaaacgttattcgggcgtcgtcgctacgttccagatcttacgtctcgtgtccgctcagtgcgcgaagctgctgagcgtatggcctggaatatgcctgttcagggaacagcggcggacctcatgaagatcgccatggtgaaattgtttccgcgcttgaaacccttaggagcccaccttcttctgcaggtgcatgatgaattggtcttggaagtacccgaggatcgcgcagaagaagccaaagcactcgtgaaagaggttatggaaaacgcgtatccgttagatgttccgttggaggtcgaagtgggtgtaggccgtgattggcttgaagcgaaacaagactaatga

SEQ ID NO: 1310 - protein, 844 aa, synthetic construct
  REGION 1..844: note = DNA Polymerase Variant
MHHHHHHGGSGMLPLFDLEEPPKRVLLVDGHHLAYRTFYALSLTTSRGEPVQMVYGFARSLLKALKEDGQAVVVVFDAKAPSFRHEAYEAYKAGRAPTPEDFPRQLALVKRLVDLLGLVRLEAPGYEADDVLGTLAKKAEREGMEVMILTGDRDFFQLLSEKVSVLLPDGTLVTPKDVQEKYGVPPERWVDFRALTGDRSDNIPGVAGIGEKTALRLLAEWGSVENLLKNLDRVKPDSLRRKIEAHLEDLRLSLDLVRIRTDLPLEVDFKALRRRTPDLEGLRAFLEELELGSLLHEFGLLGGEKPREEAPWPPPEGAFVGFLLSRKEPMWAELLALAAAAEGRVHRATSPVEALADLKEARGFLAKDLAVLALREGVALDPTDDPLLVAYLLDSANTNPERVARRYGGEFTEDAAERALLSERLFQTLFPRLSEKLLWLYQEVERPLSRVLAHMEARGVRLDVPLLEALSFEAAKELERLEGEVFRLAGHPFNLNSRDQLEKVLFDELGLTPVTRTEKTGKRSTSAAALEALRGVHPIVELILQYRELSKLKSTYLDRLPRLVHPRTGRLHTRFNQTATATGRLSSSDPNLQNIPVRTPLGQHIRKAFVAEEGWLLLAADYSQIELRVLAHLSGDENLKRVFREGKDIHTETAAWMFGVDSALVDPKMRRAAKTVNFGVLYGMSAARLSQELGIDYKEAEAFIERYFQSFPKVRAWIERTLEEGRTRGYVETLFGRRRYVPDLTSRVRSVREAAERMAWNMPVQGTAADLMKIAMVKLFPRLKPLGAHLLLQVHDELVLEVPEDRAEEAKALVKEVMENAYPLDVPLEVEVGVGRDWLEAKQD

SEQ ID NO: 1311 - DNA, 2538 bp, synthetic construct
  misc_feature 1..2538: note = DNA Polymerase Variant
  source 1..2538: mol_type = other DNA
atgcaccatcatcatcatcatggcggtagcggcatgttaccgctgtttgatttggaagaaccaccaaaacgcgtgctgcttgttgacggccatcatctggcgtatcgtaccttctacgcactgagccttacgacctcacgtggtgagcctgtccagatggtgtatgggtttgctcgctccctgctgaaagccctgaaggaagatggtcaagccgtagtagtggttttcgatgcgaaggcaccgtcgtttcgtcacgaagcgtacgaggcctataaagctggccgcgcaccgaccccggaagactttccgcgtcagttagcgctcgtcaaacgcctcgtggatttgctgggattagttcgcttggaagctcctggctacgaggcggacgacgtgctcggtacactggccaagaaagcagaacgtgaaggcatggaggtctgcattcttaccggtgatcgcgatttcttccagctgctgtctgagaaagtgagcgttttgctgcccgatggcacgttagtaaccccgaaagatgtgcaagagaaatatggagttccgccagaacgttgggtggactttcgcgcactgactggtgatcgttcagacaacatcccgggcgttgccgggattggtgaaaagacggcgctgcgcctgctggcagaatggggctcggtggaaaatctgctcaagaaccttgatcgtgtgaaacctgatagcttacgccgcaagatcgaagcccacctggaagacttgcgtctgagtctggatcttgtacgtattcgcaccgatctgccgttggaagtagactttaaagctctgcgtcgtgcgacacccgatttagaggggttacgcgcgttcctcgaagaactggagctgggctccctgctgcatgaattcggtttgttgggcggagagaaaccgcgtgaagaagcaccatggccgccgcccgagggtgcctttgtcggctttcttctgtcacgcaaagagccaatgtgggcggaactgttagctcttgcagccgccgcggaagggcgtgttcaccgcgcgacctctcctgtcgaggccctcgctgacctcaaagaagcacgtggtttcttggcgaaagatttagccgtgcttgcattacgcgaaggcgttgcgctcgatccgacggacgacccgcttttggtggcttatttgctcgatagcgcgaataccaacccggaacgtgtcgcccgtcgttacggcggcgagtttactgaagatgcggcagaacgcgcgttgcttagcgaacgcctcttccagacgttatttccacgtctttcggagaaattactctggctctatcaggaagtcgaacgtccattgagtcgcgtgcttgcccatatggaggctcgcggtgtgcgcttagatgttccgttgttagaagcactcagcttcgaggcggcaaaagaactggaacgtcttgaaggcgaagtctttcgtttagcggggcatcccttcaatctcaactctcgcgaccaattggagaaagtgctctttgatgaattaggtttaacccctgtcacgcgtacagagaagaccggcaaacgttccacttcggcagccgccttggaagcacttcgtggtgtgcacccgatcgtcgagttgattttgcagtatcgcgagctcagcaaactcaaatcaacctatcttgataggttacctcgtcttgttcatccacgtacgggtcgtttacacacccgcttcaatcaaacggcaacagccaccgggcgcttgtcgtcgagtgacccgaacctccagaatattccagtgcgcacgccgctgggccaacacattcgtaaagcgtttgttgcggaagaaggttggttattacttgcggccgattactcccagatcgaacttcgtgtattggcgcatctctctggcgacgagaatcttaaacgcgtgtttcgcgaaggcaaggatattcacactgaaaccgcagcctggatgttcggggtggactcggccttagtggaccccaagatgcgtcgtgccgccaagaccgtcaactttggcgtactctatggtatgtcagcagcacgtcttagtcaggaattgggcattgactacaaagaagctgaagcgtttatcgagcgctatttccaatcctttccgaaagttcgcgcgtggattgaacgtacgctcgaagaaggtcgcactcgcggctatgtggaaacgttattcgggcgtcgtcgctacgttccagatcttacgtctcgtgtccgctcagtgcgcgaagctgctgagcgtatggcctggaatatgcctgttcagggaacagcggcggacctcatgaagatcgccatggtgaaattgtttccgcgcttgaaacccttaggagcccaccttcttctgcaggtgcatgatgaattggtcttggaagtacccgaggatcgcgcagaagaagccaaagcactcgtgaaagaggttatggaaaacgcgtatccgttagatgttccgttggaggtcgaagtgggtgtaggccgtgattggcttgaagcgaaacaagactaatga

SEQ ID NO: 1312 - protein, 844 aa, synthetic construct
  REGION 1..844: note = DNA Polymerase Variant
MHHHHHHGGSGMLPLFDLEEPPKRVLLVDGHHLAYRTFYALSLTTSRGEPVQMVYGFARSLLKALKEDGQAVVVVFDAKAPSFRHEAYEAYKAGRAPTPEDFPRQLALVKRLVDLLGLVRLEAPGYEADDVLGTLAKKAEREGMEVCILTGDRDFFQLLSEKVSVLLPDGTLVTPKDVQEKYGVPPERWVDFRALTGDRSDNIPGVAGIGEKTALRLLAEWGSVENLLKNLDRVKPDSLRRKIEAHLEDLRLSLDLVRIRTDLPLEVDFKALRRATPDLEGLRAFLEELELGSLLHEFGLLGGEKPREEAPWPPPEGAFVGFLLSRKEPMWAELLALAAAAEGRVHRATSPVEALADLKEARGFLAKDLAVLALREGVALDPTDDPLLVAYLLDSANTNPERVARRYGGEFTEDAAERALLSERLFQTLFPRLSEKLLWLYQEVERPLSRVLAHMEARGVRLDVPLLEALSFEAAKELERLEGEVFRLAGHPFNLNSRDQLEKVLFDELGLTPVTRTEKTGKRSTSAAALEALRGVHPIVELILQYRELSKLKSTYLDRLPRLVHPRTGRLHTRFNQTATATGRLSSSDPNLQNIPVRTPLGQHIRKAFVAEEGWLLLAADYSQIELRVLAHLSGDENLKRVFREGKDIHTETAAWMFGVDSALVDPKMRRAAKTVNFGVLYGMSAARLSQELGIDYKEAEAFIERYFQSFPKVRAWIERTLEEGRTRGYVETLFGRRRYVPDLTSRVRSVREAAERMAWNMPVQGTAADLMKIAMVKLFPRLKPLGAHLLLQVHDELVLEVPEDRAEEAKALVKEVMENAYPLDVPLEVEVGVGRDWLEAKQD

SEQ ID NO: 1313 - DNA, 2538 bp, synthetic construct
  misc_feature 1..2538: note = DNA Polymerase Variant
  source 1..2538: mol_type = other DNA
atgcaccatcatcatcatcatggcggtagcggcatgttaccgctgtttgatttggaagaaccaccaaaacgcgtgctgcttgttgacggccatcatctggcgtatcgtaccttctacgcactgagccttacgacctcacgtggtgagcctgtccagatggtgtatgggtttgctcgctccctgctgaaagccctgaaggaagatggtcaagccgtagtagtggttttcgatgcgaaggcaccgtcgtttcgtcacgaagcgtacgaggcctataaagctggccgcgcaccgaccccggaagactttccgcgtcagttagcgctcgtcaaacgcctcgtggatttgctgggattagttcgcttggaagctcctggctacgaggcggacgacgtgctcggtacactggccaagaaagcagaacgtgaaggcatggaggtctgcattcttaccggtgatcgcgatttcttccagctgctgtctgagaaagtgagcgttttgctgcccgatggcacgttagtaaccccgaaagatgtgcaagagaaatatggagttccgccagaacgttgggtggactttcgcgcactgactggtgatcgttcagacaacatcccgggcgttgccgggattggtgaaaagacggcgctgcgcctgctggcagaatggggctcggtggaaaatctgctcaagaaccttgatcgtgtgaaacctgatagcttacgccgcaagatcgaagcccacctggaagacttgcgtctgagtctggatcttgtacgtattcgcaccgatctgccgttggaagtagactttaaagctctgcgtcgtcgcacacccgatttagaggggttacgcgcgttcctcgaagaactggagctgggctccctgctgcatgaattcggtttgttgggcggagagaaaccgcgtgaagaagcaccatggccgccgcccgagggtgcctttgtcggctttcttctgtcacgcaaagagccaatgtgggcggaactgttagctcttgcagccgccgcggaagggcgtgttcaccgcgcgacctctcctgtcgaggccctcgctgacctcaaagaagcacgtggtttcttggcgaaagatttagccgtgcttgcattacgcgaaggcgttgcgctcgatccgacggacgacccgcttttggtggcttatttgctcgatagcgcgaataccaacccggaacgtgtcgcccgtcgttacggcggcgagtttactgaagatgcggcagaacgcgcgttgcttagcgaacgcctcttccagacgttatttccacgtctttcggagaaattactctggctctatcaggaagtcgaacgtccattgagtcgcgtgcttgcccatatggaggctcgcggtgtgcgcttagatgttccgttgttagaagcactcagcttcgaggcggcaaaagaactggaacgtcttgaaggcgaagtctttcgtttagcggggcatcccttcaatctcaactctcgcgaccaattggagaaagtgctctttgatgaattaggtttaacccctgtcacgcgtacagagaagaccggcaaacgttccacttcggcagccgccttggaagcacttcgtggtgtgcacccgatcgtcgagttgattttgcagtatcgcgagctcagcaaactcaaatcaacctatcttgataggttacctcgtcttgttcatccacgtacgatgcgtttacacacccgcttcaatcaaacggcaacagccaccgggcgcttgtcgtcgagtgacccgaacctccagaatattccagtgcgcacgccgctgggccaacacattcgtaaagcgtttgttgcggaagaaggttggttattacttgcggccgattactcccagatcgaacttcgtgtattggcgcatctctctggcgacgagaatcttaaacgcgtgtttcgcgaaggcaaggatattcacactgaaaccgcagcctggatgttcggggtggactcggccttagtggaccccaagatgcgtcgtgccgccaagaccgtcaactttggcgtactctatggtatgtcagcagcacgtcttagtcaggaattgggcattgactacaaagaagctgaagcgtttatcgagcgctatttccaatcctttccgaaagttcgcgcgtggattgaacgtacgctcgaagaaggtcgcactcgcggctatgtggaaacgttattcgggcgtcgtcgctacgttccagatcttacgtctcgtgtccgctcagtgcgcgaagctgctgagcgtatggcctggaatatgcctgttcagggaacagcggcggacctcatgaagatcgccatggtgaaattgtttccgcgcttgaaacccttaggagcccaccttcttctgcaggtgcatgatgaattggtcttggaagtacccgaggatcgcgcagaagaagccaaagcactcgtgaaagaggttatggaaaacgcgtatccgttagatgttccgttggaggtcgaagtgggtgtaggccgtgattggcttgaagcgaaacaagactaatga

SEQ ID NO: 1314 - protein, 844 aa, synthetic construct
  REGION 1..844: note = DNA Polymerase Variant
MHHHHHHGGSGMLPLFDLEEPPKRVLLVDGHHLAYRTFYALSLTTSRGEPVQMVYGFARSLLKALKEDGQAVVVVFDAKAPSFRHEAYEAYKAGRAPTPEDFPRQLALVKRLVDLLGLVRLEAPGYEADDVLGTLAKKAEREGMEVCILTGDRDFFQLLSEKVSVLLPDGTLVTPKDVQEKYGVPPERWVDFRALTGDRSDNIPGVAGIGEKTALRLLAEWGSVENLLKNLDRVKPDSLRRKIEAHLEDLRLSLDLVRIRTDLPLEVDFKALRRRTPDLEGLRAFLEELELGSLLHEFGLLGGEKPREEAPWPPPEGAFVGFLLSRKEPMWAELLALAAAAEGRVHRATSPVEALADLKEARGFLAKDLAVLALREGVALDPTDDPLLVAYLLDSANTNPERVARRYGGEFTEDAAERALLSERLFQTLFPRLSEKLLWLYQEVERPLSRVLAHMEARGVRLDVPLLEALSFEAAKELERLEGEVFRLAGHPFNLNSRDQLEKVLFDELGLTPVTRTEKTGKRSTSAAALEALRGVHPIVELILQYRELSKLKSTYLDRLPRLVHPRTMRLHTRFNQTATATGRLSSSDPNLQNIPVRTPLGQHIRKAFVAEEGWLLLAADYSQIELRVLAHLSGDENLKRVFREGKDIHTETAAWMFGVDSALVDPKMRRAAKTVNFGVLYGMSAARLSQELGIDYKEAEAFIERYFQSFPKVRAWIERTLEEGRTRGYVETLFGRRRYVPDLTSRVRSVREAAERMAWNMPVQGTAADLMKIAMVKLFPRLKPLGAHLLLQVHDELVLEVPEDRAEEAKALVKEVMENAYPLDVPLEVEVGVGRDWLEAKQD

SEQ ID NO: 1315 - DNA, 2538 bp, synthetic construct
  misc_feature 1..2538: note = DNA Polymerase Variant
  source 1..2538: mol_type = other DNA
atgcaccatcatcatcatcatggcggtagcggcatgttaccgctgtttgatttggaagaaccaccaaaacgcgtgctgcttgttgacggccatcatctggcgtatcgtaccttctacgcactgagccttacgacctcacgtggtgagcctgtccagatggtgtatgggtttgctcgctccctgctgaaagccctgaaggaagatggtcaagccgtagtagtggttttcgatgcgaaggcaccgtcgtttcgtcacgaagcgtacgaggcctataaagctggccgcgcaccgaccccggaagactttccgcgtcagttagcgctcgtcaaacgcctcgtggatttgctgggattagttcgcttggaagctcctggctacgaggcggacgacgtgctcggtacactggccaagaaagcagaacgtgaaggcatggaggtctgcattcttaccggtgatcgcgatttcttccagctgctgtctgagaaagtgagcgttttgctgcccgatggcacgttagtaaccccgaaagatgtgcaagagaaatatggagttccgccagaacgttgggtggactttcgcgcactgactggtgatcgttcagacaacatcccgggcgttgccgggattggtgaaaagacggcgctgcgcctgctggcagaatggggctcggtggaaaatctgctcaagaaccttgatcgtgtgaaacctgatagcttacgccgcaagatcgaagcccacctggaagacttgcgtctgagtctggatcttgtacgtattcgcaccgatctgccgttggaagtagactttaaagctctgcgtcgtcgcacacccgatttagaggggttacgcgcgttcctcgaagaactggagctgggctccctgctgcatgaattcggtttgttgggcggagagaaaccgcgtgaagaagcaccatggccgccgcccgagggtgcctttgtcggctttcttctgtcacgcaaagagccaatgtgggcggaactgttagctcttgcagccgccgcggaagggcgtgttcaccgcgcgacctctcctgtcgaggccctcgctgacctcaaagaagcacgtggtttcttggcgaaagatttagccgtgcttgcattacgcgaaggcgttgcgctcgatccgacggacgacccgcttttggtggcttatttgctcgatagcgcgaataccaacccggaacgtgtcgcccgtcgttacggcggcgagtttactgaagatgcggcagaacgcgcgttgcttagcgaacgcctcttccagacgttatttccacgtctttcggagaaattactctggctctatcaggaagtcgaacgtccattgagtcgcgtgcttgcccatatggaggctcgcggtgtgcgcttagatgttccgttgttagaagcactcagcttcgaggcggcaaaagaactggaacgtcttgaaggcgaagtctttcgtttagcggggcatcccttcaatctcaactctcgcgaccaattggagaaagtgctctttgatgaattaggtttaacccctgtcacgcgtacagagaagaccggcaaacgttccacttcggcagccgccttggaagcacttcgtggtgtgcacccgatcgtcgagttgattttgcagtatcgcgagctcagcaaactcaaatcaacctatcttgataggttacctcgtcttgttcatccacgtacgggtcgtttacacacccgcttcaatcaaacggcaacagccaccgggcgcttgtcgtcgagtgacccgaacctccagaatattccagtgcgcacgccgctgggccaacacattcgtaaagcgtttgttgcggaagaaggttggttattacttgcggccgattactcccagatcgaacttcgtgtattggcgcatctctctggcgacgagaatcttaaacgcgtgtttcgcgaaggcaaggatattcacactgaaaccgcagcctggatgttcggggtggactcggccttagtggaccccaagatgcgtcgtgccgccaagaccgtcaactttggcgtactctatggtatgtcagcagcacgtcttagtcaggaattgggcattgactacaaagaagctgaagcgtttatcgagcgctatttccaatcctttccgaaagttcgcgcgtggattgaacgtacgctcgaagaaggtcgcactcgcggctatgtggaaacgttacttgggcgtcgtcgctacgttccagatcttacgtctcgtgtccgctcagtgcgcgaagctgctgagcgtatggcctggaatatgcctgttcagggaacagcggcggacctcatgaagatcgccatggtgaaattgtttccgcgcttgaaacccttaggagcccaccttcttctgcaggtgcatgatgaattggtcttggaagtacccgaggatcgcgcagaagaagccaaagcactcgtgaaagaggttatggaaaacgcgtatccgttagatgttccgttggaggtcgaagtgggtgtaggccgtgattggcttgaagcgaaacaagactaatga

SEQ ID NO: 1316 - protein, 844 aa, synthetic construct
  REGION 1..844: note = DNA Polymerase Variant
MHHHHHHGGSGMLPLFDLEEPPKRVLLVDGHHLAYRTFYALSLTTSRGEPVQMVYGFARSLLKALKEDGQAVVVVFDAKAPSFRHEAYEAYKAGRAPTPEDFPRQLALVKRLVDLLGLVRLEAPGYEADDVLGTLAKKAEREGMEVCILTGDRDFFQLLSEKVSVLLPDGTLVTPKDVQEKYGVPPERWVDFRALTGDRSDNIPGVAGIGEKTALRLLAEWGSVENLLKNLDRVKPDSLRRKIEAHLEDLRLSLDLVRIRTDLPLEVDFKALRRRTPDLEGLRAFLEELELGSLLHEFGLLGGEKPREEAPWPPPEGAFVGFLLSRKEPMWAELLALAAAAEGRVHRATSPVEALADLKEARGFLAKDLAVLALREGVALDPTDDPLLVAYLLDSANTNPERVARRYGGEFTEDAAERALLSERLFQTLFPRLSEKLLWLYQEVERPLSRVLAHMEARGVRLDVPLLEALSFEAAKELERLEGEVFRLAGHPFNLNSRDQLEKVLFDELGLTPVTRTEKTGKRSTSAAALEALRGVHPIVELILQYRELSKLKSTYLDRLPRLVHPRTGRLHTRFNQTATATGRLSSSDPNLQNIPVRTPLGQHIRKAFVAEEGWLLLAADYSQIELRVLAHLSGDENLKRVFREGKDIHTETAAWMFGVDSALVDPKMRRAAKTVNFGVLYGMSAARLSQELGIDYKEAEAFIERYFQSFPKVRAWIERTLEEGRTRGYVETLLGRRRYVPDLTSRVRSVREAAERMAWNMPVQGTAADLMKIAMVKLFPRLKPLGAHLLLQVHDELVLEVPEDRAEEAKALVKEVMENAYPLDVPLEVEVGVGRDWLEAKQD

SEQ ID NO: 1317 - DNA, 2538 bp, synthetic construct
  misc_feature 1..2538: note = DNA Polymerase Variant
  source 1..2538: mol_type = other DNA
atgcaccatcatcatcatcatggcggtagcggcatgttaccgctgtttgatttggaagaaccaccaaaacgcgtgctgcttgttgacggccatcatctggcgtatcgtaccttctacgcactgagccttacgacctcacgtggtgagcctgtccagatggtgtatgggtttgctcgctccctgctgaaagccctgaaggaagatggtcaagccgtagtagtggttttcgatgcgaaggcaccgtcgtttcgtcacgaagcgtacgaggcctataaagctggccgcgcaccgaccccggaagactttccgcgtcagttagcgctcgtcaaacgcctcgtggatttgctgggattagttcgcttggaagctcctggctacgaggcggacgacgtgctcggtacactggccaagaaagcagaacgtgaaggcatggaggtctgcattcttaccggtgatcgcgatttcttccagctgctgtctgagaaagtgagcgttttgctgcccgatggcacgttagtaaccccgaaagatgtgcaagagaaatatggagttccgccagaacgttgggtggactttcgcgcactgactggtgatcgttcagacaacatcccgggcgttgccgggattggtgaaaagacggcgctgcgcctgctggcagaatggggctcggtggaaaatctgctcaagaaccttgatcgtgtgaaacctgatagcttacgccgcaagatcgaagcccacctggaagacttgcgtctgagtctggatcttgtacgtattcgcaccgatctgccgttggaagtagactttaaagctctgcgtcgtcgcacacccgatttagaggggttacgcgcgttcctcgaagaactggagctgggctccctgctgcatgaattcggtttgttgggcggagagaaaccgcgtgaagaagcaccatggccgccgcccgagggtgcctttgtcggctttcttctgtcacgcaaagagccaatgtgggcggaactgttagctcttgcagccgcctatgaagggcgtgttcaccgcgcgacctctcctgtcgaggccctcgctgacctcaaagaagcacgtggtttcttggcgaaagatttagccgtgcttgcattacgcgaaggcgttgcgctcgatccgacggacgacccgcttttggtggcttatttgctcgatagcgcgaataccaacccggaacgtgtcgcccgtcgttacggcggcgagtttactgaagatgcggcagaacgcgcgttgcttagcgaacgcctcttccagacgttatttccacgtctttcggagaaattactctggctctatcaggaagtcgaacgtccattgagtcgcgtgcttgcccatatggaggctcgcggtgtgcgcttagatgttccgttgttagaagcactcagcttcgaggcggcaaaagaactggaacgtcttgaaggcgaagtctttcgtttagcggggcatcccttcaatctcaactctcgcgaccaattggagaaagtgctctttgatgaattaggtttaacccctgtcacgcgtacagagaagaccggcaaacgttccacttcggcagccgccttggaagcacttcgtggtgtgcacccgatcgtcgagttgattttgcagtatcgcgagctcagcaaactcaaatcaacctatcttgataggttacctcgtcttgttcatccacgtacgggtcgtttacacacccgcttcaatcaaacggcaacagccaccgggcgcttgtcgtcgagtgacccgaacctccagaatattccagtgcgcacgccgctgggccaacacattcgtaaagcgtttgttgcggaagaaggttggttattacttgcggccgattactcccagatcgaacttcgtgtattggcgcatctctctggcgacgagaatcttaaacgcgtgtttcgcgaaggcaaggatattcacactgaaaccgcagcctggatgttcggggtggactcggccttagtggaccccaagatgcgtcgtgccgccaagaccgtcaactttggcgtactctatggtatgtcagcagcacgtcttagtcaggaattgggcattgactacaaagaagctgaagcgtttatcgagcgctatttccaatcctttccgaaagttcgcgcgtggattgaacgtacgctcgaagaaggtcgcactcgcggctatgtggaaacgttattcgggcgtcgtcgctacgttccagatcttacgtctcgtgtccgctcagtgcgcgaagctgctgagcgtatggcctggaatatgcctgttcagggaacagcggcggacctcatgaagatcgccatggtgaaattgtttccgcgcttgaaacccttaggagcccaccttcttctgcaggtgcatgatgaattggtcttggaagtacccgaggatcgcgcagaagaagccaaagcactcgtgaaagaggttatggaaaacgcgtatccgttagatgttccgttggaggtcgaagtgggtgtaggccgtgattggcttgaagcgaaacaagactaatga

SEQ ID NO: 1318 - protein, 844 aa, synthetic construct
  REGION 1..844: note = DNA Polymerase Variant
MHHHHHHGGSGMLPLFDLEEPPKRVLLVDGHHLAYRTFYALSLTTSRGEPVQMVYGFARSLLKALKEDGQAVVVVFDAKAPSFRHEAYEAYKAGRAPTPEDFPRQLALVKRLVDLLGLVRLEAPGYEADDVLGTLAKKAEREGMEVCILTGDRDFFQLLSEKVSVLLPDGTLVTPKDVQEKYGVPPERWVDFRALTGDRSDNIPGVAGIGEKTALRLLAEWGSVENLLKNLDRVKPDSLRRKIEAHLEDLRLSLDLVRIRTDLPLEVDFKALRRRTPDLEGLRAFLEELELGSLLHEFGLLGGEKPREEAPWPPPEGAFVGFLLSRKEPMWAELLALAAAYEGRVHRATSPVEALADLKEARGFLAKDLAVLALREGVALDPTDDPLLVAYLLDSANTNPERVARRYGGEFTEDAAERALLSERLFQTLFPRLSEKLLWLYQEVERPLSRVLAHMEARGVRLDVPLLEALSFEAAKELERLEGEVFRLAGHPFNLNSRDQLEKVLFDELGLTPVTRTEKTGKRSTSAAALEALRGVHPIVELILQYRELSKLKSTYLDRLPRLVHPRTGRLHTRFNQTATATGRLSSSDPNLQNIPVRTPLGQHIRKAFVAEEGWLLLAADYSQIELRVLAHLSGDENLKRVFREGKDIHTETAAWMFGVDSALVDPKMRRAAKTVNFGVLYGMSAARLSQELGIDYKEAEAFIERYFQSFPKVRAWIERTLEEGRTRGYVETLFGRRRYVPDLTSRVRSVREAAERMAWNMPVQGTAADLMKIAMVKLFPRLKPLGAHLLLQVHDELVLEVPEDRAEEAKALVKEVMENAYPLDVPLEVEVGVGRDWLEAKQD

SEQ ID NO: 1319 - DNA, 2538 bp, synthetic construct
  misc_feature 1..2538: note = DNA Polymerase Variant
  source 1..2538: mol_type = other DNA
atgcaccatcatcatcatcatggcggtagcggcatgttaccgctgtttgatttggaagaaccaccaaaacgcgtgctgcttgttgacggccatcatctggcgtatcgtaccttctacgcactgagccttacgacctcacgtggtgagcctgtccagatggtgtatgggtttgctcgctccctgctgaaagccctgaaggaagatggtcaagccgtagtagtggttttcgatgcgaaggcaccgtcgtttcgtcacgaagcgtacgaggcctataaagctggccgcgcaccgaccccggaagactttccgcgtcagttagcgctcgtcaaacgcctcgtggatttgctgggattagttcgcttggaagctcctggctacgaggcggacgacgtgctcggtacactggccaagaaagcagaacgtgaaggcatggaggtctgcattcttaccggtgatcgcgatttcttccagctgctgtctgagaaagtgagcgttttgctgcccgatggcacgttagtaaccccgaaagatgtgcaagagaaatatggagttccgccagaacgttgggtggactttcgcgcactgactggtgatcgttcagacaacatcccgggcgttgccgggattggtgaaaagacggcgctgcgcctgctggcagaatggggctcggtggaaaatctgctcaagaaccttgatcgtgtgaaacctgatagcttacgccgcaagatcgaagcccacctggaagacttgcgtctgagtctggatcttgtacgtattcgcaccgatctgccgttggaagtagactttaaagctctgcgtcgtcgcacacccgatttagaggggttacgcgcgttcctcgaagaactggagctgggctccctgctgcatgaattcggtttgttgggcggagagaaaccgcgtgaagaagcaccatggccgccgcccgagggtgcctttgtcggctttcttctgtcacgcaaagagccaatgtgggcggaactgttagagcttgcagccgccgcggaagggcgtgttcaccgcgcgacctctcctgtcgaggccctcgctgacctcaaagaagcacgtggtttcttggcgaaagatttagccgtgcttgcattacgcgaaggcgttgcgctcgatccgacggacgacccgcttttggtggcttatttgctcgatagcgcgaataccaacccggaacgtgtcgcccgtcgttacggcggcgagtttactgaagatgcggcagaacgcgcgttgcttagcgaacgcctcttccagacgttatttccacgtctttcggagaaattactctggctctatcaggaagtcgaacgtccattgagtcgcgtgcttgcccatatggaggctcgcggtgtgcgcttagatgttccgttgttagaagcactcagcttcgaggcggcaaaagaactggaacgtcttgaaggcgaagtctttcgtttagcggggcatcccttcaatctcaactctcgcgaccaattggagaaagtgctctttgatgaattaggtttaacccctgtcacgcgtacagagaagaccggcaaacgttccacttcggcagccgccttggaagcacttcgtggtgtgcacccgatcgtcgagttgattttgcagtatcgcgagctcagcaaactcaaatcaacctatcttgataggttacctcgtcttgttcatccacgtacgggtcgtttacacacccgcttcaatcaaacggcaacagccaccgggcgcttgtcgtcgagtgacccgaacctccagaatattccagtgcgcacgccgctgggccaacacattcgtaaagcgtttgttgcggaagaaggttggttattacttgcggccgattactcccagatcgaacttcgtgtattggcgcatctctctggcgacgagaatcttaaacgcgtgtttcgcgaaggcaaggatattcacactgaaaccgcagcctggatgttcggggtggactcggccttagtggaccccaagatgcgtcgtgccgccaagaccgtcaactttggcgtactctatggtatgtcagcagcacgtcttagtcaggaattgggcattgactacaaagaagctgaagcgtttatcgagcgctatttccaatcctttccgaaagttcgcgcgtggattgaacgtacgctcgaagaaggtcgcactcgcggctatgtggaaacgttattcgggcgtcgtcgctacgttccagatcttacgtctcgtgtccgctcagtgcgcgaagctgctgagcgtatggcctggaatatgcctgttcagggaacagcggcggacctcatgaagatcgccatggtgaaattgtttccgcgcttgaaacccttaggagcccaccttcttctgcaggtgcatgatgaattggtcttggaagtacccgaggatcgcgcagaagaagccaaagcactcgtgaaagaggttatggaaaacgcgtatccgttagatgttccgttggaggtcgaagtgggtgtaggccgtgattggcttgaagcgaaacaagactaatga

SEQ ID NO: 1320 - protein, 844 aa, synthetic construct
  REGION 1..844: note = DNA Polymerase Variant
MHHHHHHGGSGMLPLFDLEEPPKRVLLVDGHHLAYRTFYALSLTTSRGEPVQMVYGFARSLLKALKEDGQAVVVVFDAKAPSFRHEAYEAYKAGRAPTPEDFPRQLALVKRLVDLLGLVRLEAPGYEADDVLGTLAKKAEREGMEVCILTGDRDFFQLLSEKVSVLLPDGTLVTPKDVQEKYGVPPERWVDFRALTGDRSDNIPGVAGIGEKTALRLLAEWGSVENLLKNLDRVKPDSLRRKIEAHLEDLRLSLDLVRIRTDLPLEVDFKALRRRTPDLEGLRAFLEELELGSLLHEFGLLGGEKPREEAPWPPPEGAFVGFLLSRKEPMWAELLELAAAAEGRVHRATSPVEALADLKEARGFLAKDLAVLALREGVALDPTDDPLLVAYLLDSANTNPERVARRYGGEFTEDAAERALLSERLFQTLFPRLSEKLLWLYQEVERPLSRVLAHMEARGVRLDVPLLEALSFEAAKELERLEGEVFRLAGHPFNLNSRDQLEKVLFDELGLTPVTRTEKTGKRSTSAAALEALRGVHPIVELILQYRELSKLKSTYLDRLPRLVHPRTGRLHTRFNQTATATGRLSSSDPNLQNIPVRTPLGQHIRKAFVAEEGWLLLAADYSQIELRVLAHLSGDENLKRVFREGKDIHTETAAWMFGVDSALVDPKMRRAAKTVNFGVLYGMSAARLSQELGIDYKEAEAFIERYFQSFPKVRAWIERTLEEGRTRGYVETLFGRRRYVPDLTSRVRSVREAAERMAWNMPVQGTAADLMKIAMVKLFPRLKPLGAHLLLQVHDELVLEVPEDRAEEAKALVKEVMENAYPLDVPLEVEVGVGRDWLEAKQD

SEQ ID NO: 1321 - DNA, 2538 bp, synthetic construct
  misc_feature 1..2538: note = DNA Polymerase Variant
  source 1..2538: mol_type = other DNA
atgcaccatcatcatcatcatggcggtagcggcatgttaccgctgtttgatttggaagaaccaccaaaacgcgtgctgcttgttgacggccatcatctggcgtatcgtaccttctacgcactgagccttacgacctcacgtggtgagcctgtccagatggtgtatgggtttgctcgctccctgctgaaagccctgaaggaagatggtcaagccgtagtagtggttttcgatgcgaaggcaccgtcgtttcgtcacgaagcgtacgaggcctataaagctggccgcgcaccgaccccggaagactttccgcgtcagttagcgctcgtcaaacgcctcgtggatttgctgggattagttcgcttggaagctcctggctacgaggcggacgacgtgctcggtacactggccaagaaagcagaacgtgaaggcatggaggtctgcattcttaccggtgatcgcgatttcttccagctgctgtctgagaaagtgagcgttttgctgcccgatggcacgttagtaaccccgaaagatgtgcaagagaaatatggagttccgccagaacgttgggtggactttcgcgcactgactggtgatcgttcagacaacatcccgggcgttgccgggattggtgaaaagacggcgctgcgcctgctggcagaatggggctcggtggaaaatctgctcaagaaccttgatcgtgtgaaacctgatagcttacgccgcaagatcgaagcccacctggaagacttgcgtctgagtctggatcttgtacgtattcgcaccgatctgccgttggaagtagactttaaagctctgcgtcgtcgcacacccgatttagaggggttacgcgcgttcctcgaagaactggagctgggctccctgctgcatgaattcggtttgttgggcggagagaaaccgcgtgaagaagcaccatggccgccgcccgagggtgcctttgtcggctttcttctgtcacgcaaagagccaatgtgggcggaactgttagctcttgcagccgcccatgaagggcgtgttcaccgcgcgacctctcctgtcgaggccctcgctgacctcaaagaagcacgtggtttcttggcgaaagatttagccgtgcttgcattacgcgaaggcgttgcgctcgatccgacggacgacccgcttttggtggcttatttgctcgatagcgcgaataccaacccggaacgtgtcgcccgtcgttacggcggcgagtttactgaagatgcggcagaacgcgcgttgcttagcgaacgcctcttccagacgttatttccacgtctttcggagaaattactctggctctatcaggaagtcgaacgtccattgagtcgcgtgcttgcccatatggaggctcgcggtgtgcgcttagatgttccgttgttagaagcactcagcttcgaggcggcaaaagaactggaacgtcttgaaggcgaagtctttcgtttagcggggcatcccttcaatctcaactctcgcgaccaattggagaaagtgctctttgatgaattaggtttaacccctgtcacgcgtacagagaagaccggcaaacgttccacttcggcagccgccttggaagcacttcgtggtgtgcacccgatcgtcgagttgattttgcagtatcgcgagctcagcaaactcaaatcaacctatcttgataggttacctcgtcttgttcatccacgtacgggtcgtttacacacccgcttcaatcaaacggcaacagccaccgggcgcttgtcgtcgagtgacccgaacctccagaatattccagtgcgcacgccgctgggccaacacattcgtaaagcgtttgttgcggaagaaggttggttattacttgcggccgattactcccagatcgaacttcgtgtattggcgcatctctctggcgacgagaatcttaaacgcgtgtttcgcgaaggcaaggatattcacactgaaaccgcagcctggatgttcggggtggactcggccttagtggaccccaagatgcgtcgtgccgccaagaccgtcaactttggcgtactctatggtatgtcagcagcacgtcttagtcaggaattgggcattgactacaaagaagctgaagcgtttatcgagcgctatttccaatcctttccgaaagttcgcgcgtggattgaacgtacgctcgaagaaggtcgcactcgcggctatgtggaaacgttattcgggcgtcgtcgctacgttccagatcttacgtctcgtgtccgctcagtgcgcgaagctgctgagcgtatggcctggaatatgcctgttcagggaacagcggcggacctcatgaagatcgccatggtgaaattgtttccgcgcttgaaacccttaggagcccaccttcttctgcaggtgcatgatgaattggtcttggaagtacccgaggatcgcgcagaagaagccaaagcactcgtgaaagaggttatggaaaacgcgtatccgttagatgttccgttggaggtcgaagtgggtgtaggccgtgattggcttgaagcgaaacaagactaatga

SEQ ID NO: 1322 - protein, 844 aa, synthetic construct
  REGION 1..844: note = DNA Polymerase Variant
MHHHHHHGGSGMLPLFDLEEPPKRVLLVDGHHLAYRTFYALSLTTSRGEPVQMVYGFARSLLKALKEDGQAVVVVFDAKAPSFRHEAYEAYKAGRAPTPEDFPRQLALVKRLVDLLGLVRLEAPGYEADDVLGTLAKKAEREGMEVCILTGDRDFFQLLSEKVSVLLPDGTLVTPKDVQEKYGVPPERWVDFRALTGDRSDNIPGVAGIGEKTALRLLAEWGSVENLLKNLDRVKPDSLRRKIEAHLEDLRLSLDLVRIRTDLPLEVDFKALRRRTPDLEGLRAFLEELELGSLLHEFGLLGGEKPREEAPWPPPEGAFVGFLLSRKEPMWAELLALAAAHEGRVHRATSPVEALADLKEARGFLAKDLAVLALREGVALDPTDDPLLVAYLLDSANTNPERVARRYGGEFTEDAAERALLSERLFQTLFPRLSEKLLWLYQEVERPLSRVLAHMEARGVRLDVPLLEALSFEAAKELERLEGEVFRLAGHPFNLNSRDQLEKVLFDELGLTPVTRTEKTGKRSTSAAALEALRGVHPIVELILQYRELSKLKSTYLDRLPRLVHPRTGRLHTRFNQTATATGRLSSSDPNLQNIPVRTPLGQHIRKAFVAEEGWLLLAADYSQIELRVLAHLSGDENLKRVFREGKDIHTETAAWMFGVDSALVDPKMRRAAKTVNFGVLYGMSAARLSQELGIDYKEAEAFIERYFQSFPKVRAWIERTLEEGRTRGYVETLFGRRRYVPDLTSRVRSVREAAERMAWNMPVQGTAADLMKIAMVKLFPRLKPLGAHLLLQVHDELVLEVPEDRAEEAKALVKEVMENAYPLDVPLEVEVGVGRDWLEAKQD

SEQ ID NO: 1323 - DNA, 2538 bp, synthetic construct
  misc_feature 1..2538: note = DNA Polymerase Variant
  source 1..2538: mol_type = other DNA
atgcaccatcatcatcatcatggcggtagcggcatgttaccgctgtttgatttggaagaaccaccaaaacgcgtgctgcttgttgacggccatcatctggcgtatcgtaccttctacgcactgagccttacgacctcacgtggtgagcctgtccagatggtgtatgggtttgctcgctccctgctgaaagccctgaaggaagatggtcaagccgtagtagtggttttcgatgcgaaggcaccgtcgtttcgtcacgaagcgtacgaggcctataaagctggccgcgcaccgaccccggaagactttccgcgtcagttagcgctcgtcaaacgcctcgtggatttgctgggattagttcgcttggaagctcctggctacgaggcggacgacgtgctcggtacactggccaagaaagcagaacgtgaaggcatggaggtctgcattcttaccggtgatcgcgatttcttccagctgctgtctgagaaagtgagcgttttgctgcccgatggcacgttagtaaccccgaaagatgtgcaagagaaatatggagttccgccagaacgttgggtggactttcgcgcactgactggtgatcgttcagacaacatcccgggcgttgccgggattggtgaaaagacggcgctgcgcctgctggcagaatggggctcggtggaaaatctgctcaagaaccttgatcgtgtgaaacctgatagcttacgccgcaagatcgaagcccacctggaagacttgcgtctgagtctggatcttgtacgtattcgcaccgatctgccgttggaagtagactttaaagctctgcgtcgtcgcacacccgatttagaggggttacgcgcgttcctcgaagaactggagctgggctccctgctgcatgaattcggtttgttgggcggagagaaaccgcgtgaagaagcaccatggccgccgcccgagggtgcctttgtcggctttcttctgtcacgcaaagagccaatgtgggcggaactgttagctcttgcagccgccgcggaagggcgtgttcaccgcgcgacctctcctgtcgaggccctcgctgacctcaaagaagcacgtggtttcttggcgaaagatttagccgtgcttgcattacgcgaaggcgttgcgctcgatccgacggacgacccgcttttggtggcttatttgctcgatagcgcgaataccaacccggaacgtgtcgcccgtcgttacggcggcgagtttactgaagatgcggcagaacgcgcgttgcttagcgaacgcctcttccagacgttatttccacgtctttcggagaaattactctggctctatcaggaagtcgaacgtccattgagtcgcgtgcttgcccatatggaggctcgcggtgtgcgcttagatgttccgttgttagaagcactcagcttcgaggcggcaaaagaactggaacgtcttgaaggcgaagtctttcgtttagcggggcatcccttcaatctcaactctcgcgaccaattggagaaagtgctctttgatgaattaggtttaacccctgtcacgcgtacagagaagaccggcaaacgttccacttcggcagccgccttggaagcacttcgtggtgtgcacccgatcgtcgagttgattttgcagtatcgcgagctcagcaaactcaaatcaacctatcttgataggttacctcgtcttgttcatccacgtacgggtcgtttacacacccgcttcaatcaaacggcaacagccaccgggcgcttgtcgtcgagtgacccgaacctccagaatattccagtgcgcacgccgctgggccaacacattcgtaaagcgtttgttgcggaagaaggttggttattacttgcggccgattactcccagatcgaacttcgtgtattggcgcatctctctggcgacgagaatcttaaacgcgtgtttcgcgaaggcaaggatattcacactgaaaccgcagcctggatgttcggggtggactcggccttagtggaccccaagatgcgtcgtgccgccaagaccgtcaactttggcgtactctatggtatgtcagcagcacgtcttagtcaggaattgggcattgactacaaagaagctgaagcgtttatcgagcgctatttccaatcctttccgaaagttcgcgcgtggattgaacgtacgctcgaagaaggtcgcactcgcggctatgtggaaacgttattcgggcgtcgtcgctacgttccagatcttacgtctcgtgtccgctcagtgcgcgaagctgctgagcgtatggcctggaatatgcctgttcagggaacagcggcggacctcatgaagatcgccatggtgaaattgtttccgcgcttgaaacccttaggagcccaccttcttctgcaggtgcatgatgaattggtcttggaagtacccgaggatcgcgcagaagaagccaaagcactcgtgcttgaggttatggaaaacgcgtatccgttagatgttccgttggaggtcgaagtgggtgtaggccgtgattggcttgaagcgaaacaagactaatga

SEQ ID NO: 1324 - protein, 844 aa, synthetic construct
  REGION 1..844: note = DNA Polymerase Variant
MHHHHHHGGSGMLPLFDLEEPPKRVLLVDGHHLAYRTFYALSLTTSRGEPVQMVYGFARSLLKALKEDGQAVVVVFDAKAPSFRHEAYEAYKAGRAPTPEDFPRQLALVKRLVDLLGLVRLEAPGYEADDVLGTLAKKAEREGMEVCILTGDRDFFQLLSEKVSVLLPDGTLVTPKDVQEKYGVPPERWVDFRALTGDRSDNIPGVAGIGEKTALRLLAEWGSVENLLKNLDRVKPDSLRRKIEAHLEDLRLSLDLVRIRTDLPLEVDFKALRRRTPDLEGLRAFLEELELGSLLHEFGLLGGEKPREEAPWPPPEGAFVGFLLSRKEPMWAELLALAAAAEGRVHRATSPVEALADLKEARGFLAKDLAVLALREGVALDPTDDPLLVAYLLDSANTNPERVARRYGGEFTEDAAERALLSERLFQTLFPRLSEKLLWLYQEVERPLSRVLAHMEARGVRLDVPLLEALSFEAAKELERLEGEVFRLAGHPFNLNSRDQLEKVLFDELGLTPVTRTEKTGKRSTSAAALEALRGVHPIVELILQYRELSKLKSTYLDRLPRLVHPRTGRLHTRFNQTATATGRLSSSDPNLQNIPVRTPLGQHIRKAFVAEEGWLLLAADYSQIELRVLAHLSGDENLKRVFREGKDIHTETAAWMFGVDSALVDPKMRRAAKTVNFGVLYGMSAARLSQELGIDYKEAEAFIERYFQSFPKVRAWIERTLEEGRTRGYVETLFGRRRYVPDLTSRVRSVREAAERMAWNMPVQGTAADLMKIAMVKLFPRLKPLGAHLLLQVHDELVLEVPEDRAEEAKALVLEVMENAYPLDVPLEVEVGVGRDWLEAKQD

SEQ ID NO: 1325 - DNA, 2538 bp, synthetic construct
  misc_feature 1..2538: note = DNA Polymerase Variant
  source 1..2538: mol_type = other DNA
atgcaccatcatcatcatcatggcggtagcggcatgttaccgctgtttgatttggaagaaccaccaaaacgcgtgctgcttgttgacggccatcatctggcgtatcgtaccttctacgcactgagccttacgacctcacgtggtgagcctgtccagatggtgtatgggtttgctcgctccctgctgaaagccctgaaggaagatggtcaagccgtagtagtggttttcgatgcgaaggcaccgtcgtttcgtcacgaagcgtacgaggcctataaagctggccgcgcaccgaccccggaagactttccgcgtcagttagcgctcgtcaaacgcctcgtggatttgctgggattagttcgcttggaagctcctggctacgaggcggacgacgtgctcggtacactggccaagaaagcagaacgtgaaggcatggaggtctgcattcttaccggtgatcgcgatttcttccagctgctgtctgagaaagtgagcgttttgctgcccgatggcacgttagtaaccccgaaagatgtgcaagagaaatatggagttccgccagaacgttgggtggactttcgcgcactgactggtgatcgttcagacaacatcccgggcgttgccgggattggtgaaaagacggcgctgcgcctgctggcagaatggggctcggtggaaaatctgctcaagaaccttgatcgtgtgaaacctgatagcttacgccgcaagatcgaagcccacctggaagacttgcgtctgagtctggatcttgtacgtattcgcaccgatctgccgttggaagtagactttaaagctctgcgtcgtcgcacacccgatttagaggggttacgcgcgttcctcgaagaactggagctgggctccctgctgcatgaattcggtttgttgggcggagagaaaccgcgtgaagaagcaccatggccgccgcccgagggtgcctttgtcggctttcttctgtcacgcaaagagccaatgtgggcggaactgttagctcttgcagccgccgcggaagggcgtgttcaccgcgcgacctctcctgtcgaggccctcgctgacctcaaagaagcacgtggtttcttggcgaaagatttagccgtgcttgcattacgcgaaggcgttgcgctcgatccgacggacgacccgcttttggtggcttatttgctcgatagcgcgaataccaacccggaacgtgtcgcccgtcgttacggcggcgagtttactgaagatgcggcagaacgcgcgttgcttagcgaacgcctcttccagacgttatttccacgtctttcggagaaattactctggctctatcaggaagtcgaacgtccattgagtcgcgtgcttgcccatatggaggctcgcggtgtgcgcttagatgttccgttgttagaagcactcagcttcgaggcggcaaaagaactggaacgtcttgaaggcgaagtctttcgtttagcggggcatcccttcaatctcaactctcgcgaccaattggagaaagtgctctttgatgaattaggtttaacccctgtcacgcgtacagagaagaccggcaaacgttccacttcggcagccgccttggaagcacttcgtggtgtgcacccgatcgtcgagttgattttgcagtatcgcgagctcagcaaactcaaatcaacctatcttgataggttacctcgtcttgttcatccacgtacgggtcgtttacacacccgcttcaatcaaacggcaacagccaccgggcgcttgtcgtcgagtgacccgaacctccagaatattccagtgcgcacgccgctgggccaacacattcgtaaagcgtttgttgcggaagaaggttggttattacttgcggccgattactcccagatcgaacttcgtgtattggcgcatctctctggcgacgagaatcttaaacgcgtgtttcgcgaaggcaaggatattcacactgaaaccgcagcctggatgttcggggtggactcggccttagtggaccccaagatgcgtcgtgccgccaagaccgtcaactttggcgtactctatggtatgtcagcagcacgtcttagtcaggaattgggcattgactacaaagaagctgaagcgtttatcgagcgctatttccaatcctttccgaaagttcgcgcgtggattgaacgtacgctcgaagaaggtcgcactcgcggctatgtggaaacgttattcgggcgtcgtcgctacgttccagatcttacgtctcgtgtccgctcagtgcgcgaagctgctgagcgtatggcctggaatatgcctgttcagggaacagcggcggacctcatgaagatcgccatggtgaaattgtttccgcgcttgaaacccttaggagcccaccttcttctgcaggtgcatgatgaattggtcttggaagtacccgaggatcgcgcagaagaagccaaagcactcgtgagtgaggttatggaaaacgcgtatccgttagatgttccgttggaggtcgaagtgggtgtaggccgtgattggcttgaagcgaaacaagactaatga

SEQ ID NO: 1326 - protein, 844 aa, synthetic construct
  REGION 1..844: note = DNA Polymerase Variant
MHHHHHHGGSGMLPLFDLEEPPKRVLLVDGHHLAYRTFYALSLTTSRGEPVQMVYGFARSLLKALKEDGQAVVVVFDAKAPSFRHEAYEAYKAGRAPTPEDFPRQLALVKRLVDLLGLVRLEAPGYEADDVLGTLAKKAEREGMEVCILTGDRDFFQLLSEKVSVLLPDGTLVTPKDVQEKYGVPPERWVDFRALTGDRSDNIPGVAGIGEKTALRLLAEWGSVENLLKNLDRVKPDSLRRKIEAHLEDLRLSLDLVRIRTDLPLEVDFKALRRRTPDLEGLRAFLEELELGSLLHEFGLLGGEKPREEAPWPPPEGAFVGFLLSRKEPMWAELLALAAAAEGRVHRATSPVEALADLKEARGFLAKDLAVLALREGVALDPTDDPLLVAYLLDSANTNPERVARRYGGEFTEDAAERALLSERLFQTLFPRLSEKLLWLYQEVERPLSRVLAHMEARGVRLDVPLLEALSFEAAKELERLEGEVFRLAGHPFNLNSRDQLEKVLFDELGLTPVTRTEKTGKRSTSAAALEALRGVHPIVELILQYRELSKLKSTYLDRLPRLVHPRTGRLHTRFNQTATATGRLSSSDPNLQNIPVRTPLGQHIRKAFVAEEGWLLLAADYSQIELRVLAHLSGDENLKRVFREGKDIHTETAAWMFGVDSALVDPKMRRAAKTVNFGVLYGMSAARLSQELGIDYKEAEAFIERYFQSFPKVRAWIERTLEEGRTRGYVETLFGRRRYVPDLTSRVRSVREAAERMAWNMPVQGTAADLMKIAMVKLFPRLKPLGAHLLLQVHDELVLEVPEDRAEEAKALVSEVMENAYPLDVPLEVEVGVGRDWLEAKQD

SEQ ID NO: 1327 - DNA, 2538 bp, synthetic construct
  misc_feature 1..2538: note = DNA Polymerase Variant
  source 1..2538: mol_type = other DNA
atgcaccatcatcatcatcatggcggtagcggcatgttaccgctgtttgatttggaagaaccaccaaaacgcgtgctgcttgttgacggccatcatctggcgtatcgtaccttctacgcactgagccttacgacctcacgtggtgagcctgtccagatggtgtatgggtttgctcgctccctgctgaaagccctgaaggaacgcggtcaagccgtagtagtggttttcgatgcgaaggcaccgtcgtttcgtcacgaagcgtacgaggcctataaagctggccgcgcaccgaccccggaagactttccgcgtcagttagcgctcgtcaaacgcctcgtggatttgctgggattagttcgcttggaagctcctggctacgaggcggacgacgtgctcggtacactggccaagaaagcagaacgtgaaggcatggaggtccatattcttaccggtgatcgcgatttcttccagctgctgtctgagaaagtgagcgttttgctgcccgatggcacgttagtaaccccgaaagatgtgcaagagaaatatggagttccgccagaacgttgggtggactttcgcgcactgactggtgatcgttcagacaacatcccgggcgttgccgggattggtgaaaagacggcgctgcgcctgctggcagaatggggctcggtggaaaatctgctcaagaaccttgatcgtgtgaaacctgatagcttacgccgcaagatcgaagcccacctggaagacttgattctgagtctggatcttgtacgtattcgcaccgatctgccgttggaagtagactttaaagctctgcgtcgtcgcacacccgatttagaggggttacgcgcgttcctcgaagaactggagctgggctccctgctgcatgaattcggtttgttgggcggagagaaaccgcgtgaagaagcaccatggccgccgcccgagggtgcctttgtcggctttcttctgtcacgcaaagagccaatgtgggcggaactgttagctcttgcagccgccgcggaagggcgtgttcaccgcgcgacctctcctgtcgaggccctcgctgacctcaaagaagcacgtggtttcttggcgaaagatttagccgtgcttgcattacgcgaaggcgttgcgctcgatccgacggacgacccgcttttggtggcttatttgctcgatagcgcgaataccaacccggaacgtgtcgcccgtcgttacggcggcgagtttactgaagatgcggcagaacgcgcgttgcttagcgaacgcctcttccagacgttatttccacgtctttcggagaaattactctggctctatcaggaagtcgaacgtccattgagtcgcgtgcttgcccatatggaggctcgcggtgtgcgcttagatgttccgttgttagaagcactcagcttcgaggcggcaaaagaactggaacgtcttgaaggcgaagtctttcgtttagcggggcatcccttcaatctcaactctcgcgaccaattggagaaagtgctctttgatgaattaggtttaacccctgtcacgcgtacagagaagaccggcaaacgttccacttcggcagccgccttggaagcacttcgtggtgtgcacccgatcgtcgagttgattttgcagtatcgcgagctcagcaaactcaaatcaacctatcttgataggttacctcgtcttgttcatccacgtacgggtcgtttacacacccgcttcaatcaaacggcaacagccaccgggcgcttgtcgtcgagtgacccgaacctccagaatattccagtgcgcacgccgctgggcatgcacattcgtaaagcgtttgttgcggatgaaggttggttattacttgcggccgattactcccagatcgaacttcgtgtattggcgcatctctctggcgacgagaatcttaaacgcgtgtttcgcgaaggcaaggatattcacactgaaaccgcagcctggatgttcggggtggactcggccttagtggaccccaagatgcgtcgtgccgccaagaccgtcaactttggcgtactctatggtatgtcagcagcacgtcttagtcaggaattgggcattgactacaaagaagctgaagcgtttatcgagcgctatttccaatcctttccgaaagttcgcgcgtggattgaacgtacgctcgaagaaggtcgcactcgcggctatgtggaaacgttattcgggcgtcgtcgctacgttccagatcttacgtctcgtgtccgctcagtgcgcgaagctgctgagcgtatggcctggaatatgcctgttcagggaacagcggcggacctcatgaagatcgccatggtgaaattgtttccgcgcttgaaacccttaggagcccaccttcttctgcaggtgcatgatgaaattgtcttggaagtacccgaggatcgcgcagaagaagccaaagcactcgtgaaagaggttatggaaaacgcgtatccgttagatgttccgttggaggtcgaagtgggtgtaggccgtgattggcttgaagcgaaacaagactaatga

SEQ ID NO: 1328 - protein, 844 aa, synthetic construct
  REGION 1..844: note = DNA Polymerase Variant
MHHHHHHGGSGMLPLFDLEEPPKRVLLVDGHHLAYRTFYALSLTTSRGEPVQMVYGFARSLLKALKERGQAVVVVFDAKAPSFRHEAYEAYKAGRAPTPEDFPRQLALVKRLVDLLGLVRLEAPGYEADDVLGTLAKKAEREGMEVHILTGDRDFFQLLSEKVSVLLPDGTLVTPKDVQEKYGVPPERWVDFRALTGDRSDNIPGVAGIGEKTALRLLAEWGSVENLLKNLDRVKPDSLRRKIEAHLEDLILSLDLVRIRTDLPLEVDFKALRRRTPDLEGLRAFLEELELGSLLHEFGLLGGEKPREEAPWPPPEGAFVGFLLSRKEPMWAELLALAAAAEGRVHRATSPVEALADLKEARGFLAKDLAVLALREGVALDPTDDPLLVAYLLDSANTNPERVARRYGGEFTEDAAERALLSERLFQTLFPRLSEKLLWLYQEVERPLSRVLAHMEARGVRLDVPLLEALSFEAAKELERLEGEVFRLAGHPFNLNSRDQLEKVLFDELGLTPVTRTEKTGKRSTSAAALEALRGVHPIVELILQYRELSKLKSTYLDRLPRLVHPRTGRLHTRFNQTATATGRLSSSDPNLQNIPVRTPLGMHIRKAFVADEGWLLLAADYSQIELRVLAHLSGDENLKRVFREGKDIHTETAAWMFGVDSALVDPKMRRAAKTVNFGVLYGMSAARLSQELGIDYKEAEAFIERYFQSFPKVRAWIERTLEEGRTRGYVETLFGRRRYVPDLTSRVRSVREAAERMAWNMPVQGTAADLMKIAMVKLFPRLKPLGAHLLLQVHDEIVLEVPEDRAEEAKALVKEVMENAYPLDVPLEVEVGVGRDWLEAKQD

SEQ ID NO: 1329 - DNA, 2538 bp, synthetic construct
  misc_feature 1..2538: note = DNA Polymerase Variant
  source 1..2538: mol_type = other DNA
atgcaccatcatcatcatcatggcggtagcggcatgttaccgctgtttgatttggaagaaccaccaaaacgcgtgctgcttgttgacggccatcatctggcgtatcgtaccttctacgcactgagccttacgacctcacgtggtgagcctgtccagatggtgtatgggtttgctcgctccctgctgaaagccctgaaggaacgcggtcaagccgtagtagtggttttcgatgcgaaggcaccgtcgtttcgtcacgaagcgtacgaggcctataaagctggccgcgcaccgaccccggaagactttccgcgtcagttagcgctcgtcaaacgcctcgtggatttgctgggattagttcgcttggaagctcctggctacgaggcggacgacgtgctcggtacactggccaagaaagcagaacgtgaaggcatggaggtccatattcttaccggtgatcgcgatttcttccagctgctgtctgagaaagtgagcgttttgctgcccgatggcacgttagtaaccccgaaagatgtgcaagagaaatatggagttccgccagaacgttgggtggactttcgcgcactgactggtgatcgttcagacaacatcccgggcgttgccgggattggtgaaaagacggcgctgcgcctgctggcagaatggggctcggtggaaaatctgctcaagaaccttgatcgtgtgaaacctgatagcttacgccgcaagatcgaagcccacctggaagacttgcgcctgagtctggatcttgtacgtattcgcaccgatctgccgttggaagtagactttaaagctctgcgtcgtcgcacacccgatttagaggggttacgcgcgttcctcgaagaactggagctgggctccctgctgcatgaattcggtttgttgggcggagagaaaccgcgtgaagaagcaccatggccgccgcccgagggtgcctttgtcggctttcttctgtcacgcaaagagccaatgtgggcggaactgttagctcttgcagccgccgcggaagggcgtgttcaccgcgcgacctctcctgtcgaggccctcgctgacctcaaagaagcacgtggtttcttggcgaaagatttagccgtgcttgcattacgcgaaggcgttgcgctcgatccgacggacgacccgcttttggtggcttatttgctcgatagcgcgaataccaacccggaacgtgtcgcccgtcgttacggcggcgagtttactgaagatgcggcagaacgcgcgttgcttagcgaacgcctcttccagacgttatttccacgtctttcggagaaattactctggctctatcaggaagtcgaacgtccattgagtcgcgtgcttgcccatatggaggctcgcggtgtgcgcttagatgttccgttgttagaagcactcagcttcgaggcggcaaaagaactggaacgtcttgaaggcgaagtctttcgtttagcggggcatcccttcaatctcaactctcgcgaccaattggagaaagtgctctttgatgaattaggtttaacccctgtcacgcgtacagagaagaccggcaaacgttccacttcggcagccgccttggaagcacttcgtggtgtgcacccgatcgtcgagttgattttgcagtatcgcgagctcagcaaactcaaatcaacctatcttgataggttacctcgtcttgttcatccacgtacgggtcgtttacacacccgcttcaatcaaacggcaacagccaccgggcgcttgtcgtcgagtgacccgaacctccagaatattccagtgcgcacgccgctgggcatgcacattcgtaaagcgtttgttgcggaagaaggttggttattacttgcggccgattactcccagatcgaacttcgtgtattggcgcatctctctggcgacgagaatcttaaacgcgtgtttcgcgaaggcaaggatattcacactgaaaccgcagcctggatgttcggggtggactcggccttagtggaccccaagatgcgtcgtgccgccaagaccgtcaactttggcgtactctatggtatgtcagcagcacgtcttagtcaggaattgggcattgactacaaagaagctgaagcgtttatcgagcgctatttccaatcctttccgaaagttcgcgcgtggattgaacgtacgctcgaagaaggtcgcactcgcggctatgtggaaacgttattcgggcgtcgtcgctacgttccagatcttacgtctcgtgtccgctcagtgcgcgaagctgctgagcgtatggcctggaatatgcctgttcagggaacagcggcggacctcatgaagatcgccatggtgaaattgtttccgcgcttgaaacccttaggagcccaccttcttctgcaggtgcatgatgaattggtcttggaagtacccgaggatcgcgcagaagaagccaaagcactcgtgaaagaggttatggaaaacgcgtatccgttagatgttccgttggaggtcgaagtgggtgtaggccgtgattggcttgaagcgaaacaagactaatga

SEQ ID NO: 1330 - protein, 844 aa, synthetic construct
  REGION 1..844: note = DNA Polymerase Variant
MHHHHHHGGSGMLPLFDLEEPPKRVLLVDGHHLAYRTFYALSLTTSRGEPVQMVYGFARSLLKALKERGQAVVVVFDAKAPSFRHEAYEAYKAGRAPTPEDFPRQLALVKRLVDLLGLVRLEAPGYEADDVLGTLAKKAEREGMEVHILTGDRDFFQLLSEKVSVLLPDGTLVTPKDVQEKYGVPPERWVDFRALTGDRSDNIPGVAGIGEKTALRLLAEWGSVENLLKNLDRVKPDSLRRKIEAHLEDLRLSLDLVRIRTDLPLEVDFKALRRRTPDLEGLRAFLEELELGSLLHEFGLLGGEKPREEAPWPPPEGAFVGFLLSRKEPMWAELLALAAAAEGRVHRATSPVEALADLKEARGFLAKDLAVLALREGVALDPTDDPLLVAYLLDSANTNPERVARRYGGEFTEDAAERALLSERLFQTLFPRLSEKLLWLYQEVERPLSRVLAHMEARGVRLDVPLLEALSFEAAKELERLEGEVFRLAGHPFNLNSRDQLEKVLFDELGLTPVTRTEKTGKRSTSAAALEALRGVHPIVELILQYRELSKLKSTYLDRLPRLVHPRTGRLHTRFNQTATATGRLSSSDPNLQNIPVRTPLGMHIRKAFVAEEGWLLLAADYSQIELRVLAHLSGDENLKRVFREGKDIHTETAAWMFGVDSALVDPKMRRAAKTVNFGVLYGMSAARLSQELGIDYKEAEAFIERYFQSFPKVRAWIERTLEEGRTRGYVETLFGRRRYVPDLTSRVRSVREAAERMAWNMPVQGTAADLMKIAMVKLFPRLKPLGAHLLLQVHDELVLEVPEDRAEEAKALVKEVMENAYPLDVPLEVEVGVGRDWLEAKQD

SEQ ID NO: 1331 - DNA, 2538 bp, synthetic construct
  misc_feature 1..2538: note = DNA Polymerase Variant
  source 1..2538: mol_type = other DNA
atgcaccatcatcatcatcatggcggtagcggcatgttaccgctgtttgatttggaagaaccaccaaaacgcgtgctgcttgttgacggccatcatctggcgtatcgtaccttctacgcactgagccttacgacctcacgtggtgagcctgtccagatggtgtatgggtttgctcgctccctgctgaaagccctgaaggaacgcggtcaagccgtagtagtggttttcgataacaaggcaccgtcgtttcgtcacgaagcgtacgaggcctataaagctggccgcgcaccgaccccggaagactttccgcgtcagttagcgctcgtcaaacgcctcgtggatttgctgggattagttcgcttggaagctcctggctacgaggcggacgacgtgctcggtacactggccaagaaagcagaacgtgaaggcatggaggtccatattcttaccggtgatcgcgatttcttccagctgctgtctgagaaagtgagcgttttgctgcccgatggcacgttagtaaccccgaaagatgtgcaagagaaatatggagttccgccagaacgttgggtggactttcgcgcactgactggtgatcgttcagacaacatcccgggcgttgccgggattggtgaaaagacggcgctgcgcctgctggcagaatggggctcggtggaaaatctgctcaagaaccttgatcgtgtgaaacctgatagcttacgccgcaagatcgaagcccacctggaagacttgcgtctgagtctggatcttgtacgtattcgcaccgatctgccgttggaagtagactttaaagctctgcgtcgtcgcacacccgatttagaggggttacgcgcgttcctcgaagaactggagctgggctccctgctgcatgaattcggtttgttgggcggagagaaaccgcgtgaagaagcaccatggccgccgcccgagggtgcctttgtcggctttcttctgtcacgcaaagagccaatgtgggcggaactgttagctcttgcagccgccgcggaagggcgtgttcaccgcgcgacctctcctgtcgaggccctcgctgacctcaaagaagcacgtggtttcttggcgaaagatttagtcgtgcttgcattacgcgaaggcgttgcgctcgatccgacggacgacccgcttttggtggcttatttgctcgatagcgcgaataccaacccggaacgtgtcgcccgtcgttacggcggcgagtttactgaagatgcggcagaacgcgcgttgcttagcgaacgcctcttccagacgttatttccacgtctttcggagaaattactctggctctatcaggaagtcgaacgtccattgagtcgcgtgcttgcccatatggaggctcgcggtgtgcgcttagatgttccgttgttagaagcactcagcttcgaggcggcaaaagaactggaacgtcttgaaggcgaagtctttcgtttagcggggcatcccttcaatctcaactctcgcgaccaattggagaaagtgctctttgatgaattaggtttaacccctgtcacgcgtacagagaagaccggcaaacgttccacttcggcagccgccttggaagcacttcgtggtgtgcacccgatcgtcgagttgattttgcagtatcgcgagctcagcaaactcaaatcaacctatcttgataggttacctcgtcttgttcatccacgtacgggtcgtttacacacccgcttcaatcaaacggcaacagccaccgggcgcttgtcgtcgagtgacccgaacctccagaatattccagtgcgcacgccgctgggccagcacattcgtaaagcgtttgttgcggaagaaggttggttattacttgcggccgattactcccagatcgaacttcgtgtattggcgcatctctctggcgacgagaatcttaaacgcgtgtttcgcgaaggcaaggatattcacactgaaaccgcagcctggatgttcggggtggactcggccttagtggaccccaagatgcgtcgtgccgccaagaccgtcaactttggcgtactctatggtatgtcagcagcacgtcttagtcaggaattgggcattgactacaaagaagctgaagcgtttatcgagcgctatttccaatcctttccgaaagttcgcgcgtggattgaacgtacgctcgaagaaggtcgcactcgcggctatgtggaaacgttattcgggcgtcgtcgctacgttccagatcttacgtctcgtgtccgctcagtgcgcgaagctgctgagcgtatggcctggaatatgcctgttcagggaacagcggcggacctcatgaagatcgccatggtgaaattgtttccgcgcttgaaacccttaggagcccaccttcttctgcaggtgcatgatgaactggtcttggaagtacccgaggatcgcgcagaagaagccaaagcactcgtgaaagaggttatggaaaacgcgtatccgttagatgttccgttggaggtcgaagtgggtgtaggccgtgattggcttgaagcgaaacaagactaatga

SEQ ID NO: 1332 - protein, 844 aa, synthetic construct
  REGION 1..844: note = DNA Polymerase Variant
MHHHHHHGGSGMLPLFDLEEPPKRVLLVDGHHLAYRTFYALSLTTSRGEPVQMVYGFARSLLKALKERGQAVVVVFDNKAPSFRHEAYEAYKAGRAPTPEDFPRQLALVKRLVDLLGLVRLEAPGYEADDVLGTLAKKAEREGMEVHILTGDRDFFQLLSEKVSVLLPDGTLVTPKDVQEKYGVPPERWVDFRALTGDRSDNIPGVAGIGEKTALRLLAEWGSVENLLKNLDRVKPDSLRRKIEAHLEDLRLSLDLVRIRTDLPLEVDFKALRRRTPDLEGLRAFLEELELGSLLHEFGLLGGEKPREEAPWPPPEGAFVGFLLSRKEPMWAELLALAAAAEGRVHRATSPVEALADLKEARGFLAKDLVVLALREGVALDPTDDPLLVAYLLDSANTNPERVARRYGGEFTEDAAERALLSERLFQTLFPRLSEKLLWLYQEVERPLSRVLAHMEARGVRLDVPLLEALSFEAAKELERLEGEVFRLAGHPFNLNSRDQLEKVLFDELGLTPVTRTEKTGKRSTSAAALEALRGVHPIVELILQYRELSKLKSTYLDRLPRLVHPRTGRLHTRFNQTATATGRLSSSDPNLQNIPVRTPLGQHIRKAFVAEEGWLLLAADYSQIELRVLAHLSGDENLKRVFREGKDIHTETAAWMFGVDSALVDPKMRRAAKTVNFGVLYGMSAARLSQELGIDYKEAEAFIERYFQSFPKVRAWIERTLEEGRTRGYVETLFGRRRYVPDLTSRVRSVREAAERMAWNMPVQGTAADLMKIAMVKLFPRLKPLGAHLLLQVHDELVLEVPEDRAEEAKALVKEVMENAYPLDVPLEVEVGVGRDWLEAKQD

SEQ ID NO: 1333 - DNA, 2538 bp, synthetic construct
  misc_feature 1..2538: note = DNA Polymerase Variant
  source 1..2538: mol_type = other DNA
atgcaccatcatcatcatcatggcggtagcggcatgttaccgctgtttgatttggaagaaccaccaaaacgcgtgctgcttgttgacggccatcatctggcgtatcgtaccttctacgcactgagccttacgacctcacgtggtgagcctgtccagatggtgtatgggtttgctcgctccctgctgaaagccctgaaggaagatggtcaagccgtagtagtggttttcgatgcgaaggcaccgtcgtttcgtcacgaagcgtacgaggcctataaagctggccgcgcaccgaccccggaagactttccgcgtcagttagcgctcgtcaaacgcctcgtggatttgctgggattagttcgcttggaagctcctggctacgaggcggacgacgtgctcggtacactggccaagaaagcagaacgtgaaggcatggaggtccatattcttaccggtgatcgcgatttcttccagctgctgtctgagaaagtgagcgttttgctgcccgatggcacgttagtaaccccgaaagatgtgcaagagaaatatggagttccgccagaacgttgggtggactttcgcgcactgactggtgatcgttcagacaacatcccgggcgttgccgggattggtgaaaagacggcgctgcgcctgctggcagaatggggctcggtggaaaatctgctcaagaaccttgatcgtgtgaaacctgatagcttacgccgcaagatcgaagcccacctggaagacttgcgtctgagtctggatcttgtacgtattcgcaccgatctgccgttggaagtagactttaaagctctgcgtcgtcgcacacccgatttagaggggttacgcgcgttcctcgaagaactggagctgggctccctgctgcatgaattcggtttgttgggcggagagaaaccgcgtgaagaagcaccatggccgccgcccgagggtgcctttgtcggctttcttctgtcacgcaaagagccaatgtgggcggaactgttagctcttgcagccgccgcggaagggcgtgttcaccgcgcgacctctcctgtcgaggccctcgctgacctcaaagaagcacgtggtttcttggcgaaagatttagtcgtgcttgcattacgcgaaggcgttgcgctcgatccgacggacgacccgcttttggtggcttatttgctcgatagcgcgaataccaacccggaacgtgtcgcccgtcgttacggcggcgagtttactgaagatgcggcagaacgcgcgttgcttagcgaacgcctcttccagacgttatttccacgtctttcggagaaattactctggctctatcaggaagtcgaacgtccattgagtcgcgtgcttgcccatatggaggctcgcggtgtgcgcttagatgttccgttgttagaagcactcagcttcgaggcggcaaaagaactggaacgtcttgaaggcgaagtctttcgtttagcggggcatcccttcaatctcaactctcgcgaccaattggagaaagtgctctttgatgaattaggtttaacccctgtcacgcgtacagagaagaccggcaaacgttccacttcggcagccgccttggaagcacttcgtggtgtgcacccgatcgtcgagttgattttgcagtatcgcgagctcagcaaactcaaatcaacctatcttgataggttacctcgtcttgttcatccacgtacgggtcgtttacacacccgcttcaatcaaacggcaacagccaccgggcgcttgtcgtcgagtgacccgaacctccagaatattccagtgcgcacgccgctgggccagcacattcgtaaagcgtttgttgcggaagaaggttggttattacttgcggccgattactcccagatcgaacttcgtgtattggcgcatctctctggcgacgagaatcttaaacgcgtgtttcgcgaaggcaaggatattcacactgaaaccgcagcctggatgttcggggtggactcggccttagtggaccccaagatgcgtcgtgccgccaagaccgtcaactttggcgtactctatggtatgtcagcagcacgtcttagtcaggaattgggcattgactacaaagaagctgaagcgtttatcgagcgctatttccaatcctttccgaaagttcgcgcgtggattgaacgtacgctcgaagaaggtcgcactcgcggctatgtggaaacgttattcgggcgtcgtcgctacgttccagatcttacgtctcgtgtccgctcagtgcgcgaagctgctgagcgtatggcctggaatatgcctgttcagggaacagcggcggacctcatgaagatcgccatggtgaaattgtttccgcgcttgaaacccttaggagcccaccttcttctgcaggtgcatgatgaactggtcttggaagtacccgaggatcgcgcagaagaagccaaagcactcgtgaaagaggttatggaaaacgcgtatccgttagatgttccgttggaggtcgaagtgggtgtaggccgtgattggcttgaagcgaaacaagactaatga

SEQ ID NO: 1334 - protein, 844 aa, synthetic construct
  REGION 1..844: note = DNA Polymerase Variant
MHHHHHHGGSGMLPLFDLEEPPKRVLLVDGHHLAYRTFYALSLTTSRGEPVQMVYGFARSLLKALKEDGQAVVVVFDAKAPSFRHEAYEAYKAGRAPTPEDFPRQLALVKRLVDLLGLVRLEAPGYEADDVLGTLAKKAEREGMEVHILTGDRDFFQLLSEKVSVLLPDGTLVTPKDVQEKYGVPPERWVDFRALTGDRSDNIPGVAGIGEKTALRLLAEWGSVENLLKNLDRVKPDSLRRKIEAHLEDLRLSLDLVRIRTDLPLEVDFKALRRRTPDLEGLRAFLEELELGSLLHEFGLLGGEKPREEAPWPPPEGAFVGFLLSRKEPMWAELLALAAAAEGRVHRATSPVEALADLKEARGFLAKDLVVLALREGVALDPTDDPLLVAYLLDSANTNPERVARRYGGEFTEDAAERALLSERLFQTLFPRLSEKLLWLYQEVERPLSRVLAHMEARGVRLDVPLLEALSFEAAKELERLEGEVFRLAGHPFNLNSRDQLEKVLFDELGLTPVTRTEKTGKRSTSAAALEALRGVHPIVELILQYRELSKLKSTYLDRLPRLVHPRTGRLHTRFNQTATATGRLSSSDPNLQNIPVRTPLGQHIRKAFVAEEGWLLLAADYSQIELRVLAHLSGDENLKRVFREGKDIHTETAAWMFGVDSALVDPKMRRAAKTVNFGVLYGMSAARLSQELGIDYKEAEAFIERYFQSFPKVRAWIERTLEEGRTRGYVETLFGRRRYVPDLTSRVRSVREAAERMAWNMPVQGTAADLMKIAMVKLFPRLKPLGAHLLLQVHDELVLEVPEDRAEEAKALVKEVMENAYPLDVPLEVEVGVGRDWLEAKQD

SEQ ID NO: 1335 - DNA, 2538 bp, synthetic construct
  misc_feature 1..2538: note = DNA Polymerase Variant
  source 1..2538: mol_type = other DNA
atgcaccatcatcatcatcatggcggtagcggcatgttaccgctgtttgatttggaagaaccaccaaaacgcgtgctgcttgttgacggccatcatctggcgtatcgtaccttctacgcactgagccttacgacctcacgtggtgagcctgtccagatggtgtatgggtttgctcgctccctgctgaaagccctgaaggaagatggtcaagccgtagtagtggttttcgatgcgaaggcaccgtcgtttcgtcacgaagcgtacgaggcctataaagctggccgcgcaccgaccccggaagactttccgcgtcagttagcgctcgtcaaacgcctcgtggatttgctgggattagttcgcttggaagctcctggctacgaggcggacgacgtgctcggtacactggccaagaaagcagaacgtgaaggcatggaggtccatattcttaccggtgatcgcgatttcttccagctgctgtctgagaaagtgagcgttttgctgcccgatggcacgttagtaaccccgaaagatgtgcaagagaaatatggagttccgccagaacgttgggtggactttcgcgcactgactggtgatcgttcagacaacatcccgggcgttgccgggattggtgaaaagacggcgctgcgcctgctggcagaatggggctcggtggaaaatctgctcaagaaccttgatcgtgtgaaacctgatagcttacgccgcaagatcgaagcccacctggaagacttgattctgagtctggatcttgtacgtattcgcaccgatctgccgttggaagtagactttaaagctctgcgtcgtcgcacacccgatttagaggggttacgcgcgttcctcgaagaactggagctgggctccctgctgcatgaattcggtttgttgggcggagagaaaccgcgtgaagaagcaccatggccgccgcccgagggtgcctttgtcggctttcttctgtcacgcaaagagccaatgtgggcggaactgttagctcttgcagccgccgcggaagggcgtgttcaccgcgcgacctctcctgtcgaggccctcgctgacctcaaagaagcacgtggtttcttggcgaaagatttagccgtgcttgcattacgcgaaggcgttgcgctcgatccgacggacgacccgcttttggtggcttatttgctcgatagcgcgaataccaacccggaacgtgtcgcccgtcgttacggcggcgagtttactgaagatgcggcagaacgcgcgttgcttagcgaacgcctcttccagacgttatttccacgtctttcggagaaattactctggctctatcaggaagtcgaacgtccattgagtcgcgtgcttgcccatatggaggctcgcggtgtgcgcttagatgttccgttgttagaagcactcagcttcgaggcggcaaaagaactggaacgtcttgaaggcgaagtctttcgtttagcggggcatcccttcaatctcaactctcgcgaccaattggagaaagtgctctttgatgaattaggtttaacccctgtcacgcgtacagagaagaccggcaaacgttccacttcggcagccgccttggaagcacttcgtggtgtgcacccgatcgtcgagttgattttgcagtatcgcgagctcagcaaactcaaatcaacctatcttgataggttacctcgtcttgttcatccacgtacgggtcgtttacacacccgcttcaatcaaacggcaacagccaccgggcgcttgtcgtcgagtgacccgaacctccagaatattccagtgcgcacgccgctgggccagcacattcgtaaagcgtttgttgcggaagaaggttggttattacttgcggccgattactcccagatcgaacttcgtgtattggcgcatctctctggcgacgagaatcttaaacgcgtgtttcgcgaaggcaaggatattcacactgaaaccgcagcctggatgttcggggtggactcggccttagtggaccccaagatgcgtcgtgccgccaagaccgtcaactttggcgtactctatggtatgtcagcagcacgtcttagtcaggaattgggcattgactacaaagaagctgaagcgtttatcgagcgctatttccaatcctttccgaaagttcgcgcgtggattgaacgtacgctcgaagaaggtcgcactcgcggctatgtggaaacgttattcgggcgtcgtcgctacgttccagatcttacgtctcgtgtccgctcagtgcgcgaagctgctgagcgtatggcctggaatatgcctgttcagggaacagcggcggacctcatgaagatcgccatggtgaaattgtttccgcgcttgaaacccttaggagcccaccttcttctgcaggtgcatgatgaaattgtcttggaagtacccgaggatcgcgcagaagaagccaaagcactcgtgaaagaggttatggaaaacgcgtatccgttagatgttccgttggaggtcgaagtgggtgtaggccgtgattggcttgaagcgaaacaagactaatga

SEQ ID NO: 1336 - protein, 844 aa, synthetic construct
  REGION 1..844: note = DNA Polymerase Variant
MHHHHHHGGSGMLPLFDLEEPPKRVLLVDGHHLAYRTFYALSLTTSRGEPVQMVYGFARSLLKALKEDGQAVVVVFDAKAPSFRHEAYEAYKAGRAPTPEDFPRQLALVKRLVDLLGLVRLEAPGYEADDVLGTLAKKAEREGMEVHILTGDRDFFQLLSEKVSVLLPDGTLVTPKDVQEKYGVPPERWVDFRALTGDRSDNIPGVAGIGEKTALRLLAEWGSVENLLKNLDRVKPDSLRRKIEAHLEDLILSLDLVRIRTDLPLEVDFKALRRRTPDLEGLRAFLEELELGSLLHEFGLLGGEKPREEAPWPPPEGAFVGFLLSRKEPMWAELLALAAAAEGRVHRATSPVEALADLKEARGFLAKDLAVLALREGVALDPTDDPLLVAYLLDSANTNPERVARRYGGEFTEDAAERALLSERLFQTLFPRLSEKLLWLYQEVERPLSRVLAHMEARGVRLDVPLLEALSFEAAKELERLEGEVFRLAGHPFNLNSRDQLEKVLFDELGLTPVTRTEKTGKRSTSAAALEALRGVHPIVELILQYRELSKLKSTYLDRLPRLVHPRTGRLHTRFNQTATATGRLSSSDPNLQNIPVRTPLGQHIRKAFVAEEGWLLLAADYSQIELRVLAHLSGDENLKRVFREGKDIHTETAAWMFGVDSALVDPKMRRAAKTVNFGVLYGMSAARLSQELGIDYKEAEAFIERYFQSFPKVRAWIERTLEEGRTRGYVETLFGRRRYVPDLTSRVRSVREAAERMAWNMPVQGTAADLMKIAMVKLFPRLKPLGAHLLLQVHDEIVLEVPEDRAEEAKALVKEVMENAYPLDVPLEVEVGVGRDWLEAKQD

SEQ ID NO: 1337 - DNA, 2538 bp, synthetic construct
  misc_feature 1..2538: note = DNA Polymerase Variant
  source 1..2538: mol_type = other DNA
atgcaccatcatcatcatcatggcggtagcggcatgttaccgctgtttgatttggaagaaccaccaaaacgcgtgctgcttgttgacggccatcatctggcgtatcgtaccttctacgcactgagccttacgacctcacgtggtgagcctgtccagatggtgtatgggtttgctcgctccctgctgaaagccctgaaggaaggcggtcaagccgtagtagtggttttcgatgcgaaggcaccgtcgtttcgtcacgaagcgtacgaggcctataaagctggccgcgcaccgaccccggaagactttccgcgtcagttagcgctcgtcaaacgcctcgtggatttgctgggattagttcgcttggaagctcctggctacgaggcggacgacgtgctcggtacactggccaagaaagcagaacgtgaaggcatggaggtccatattcttaccggtgatcgcgatttcttccagctgctgtctgagaaagtgagcgttttgctgcccgatggcacgttagtaaccccgaaagatgtgcaagagaaatatggagttccgccagaacgttgggtggactttcgcgcactgactggtgatcgttcagacaacatcccgggcgttgccgggattggtgaaaagacggcgctgcgcctgctggcagaatggggctcggtggaaaatctgctcaagaaccttgatcgtgtgaaacctgatagcttacgccgcaagatcgaagcccacctggaagacttgcgcctgagtctggatcttgtacgtattcgcaccgatctgccgttggaagtagactttaaagctctgcgtcgtcgcacacccgatttagaggggttacgcgcgttcctcgaagaactggagctgggctccctgctgcatgaattcggtttgttgggcggagagaaaccgcgtgaagaagcaccatggccgccgcccgagggtgcctttgtcggctttcttctgtcacgcaaagagccaatgtgggcggaactgttagctcttgcagccgccgcggaagggcgtgttcaccgcgcgacctctcctgtcgaggccctcgctgacctcaaagaagcacgtggtttcttggcgaaagatttagtcgtgcttgcattacgcgaaggcgttgcgctcgatccgacggacgacccgcttttggtggcttatttgctcgatagcgcgaataccaacccggaacgtgtcgcccgtcgttacggcggcgagtttactgaagatgcggcagaacgcgcgttgcttagcgaacgcctcttccagacgttatttccacgtctttcggagaaattactctggctctatcaggaagtcgaacgtccattgagtcgcgtgcttgcccatatggaggctcgcggtgtgcgcttagatgttccgttgttagaagcactcagcttcgaggcggcaaaagaactggaacgtcttgaaggcgaagtctttcgtttagcggggcatcccttcaatctcaactctcgcgaccaattggagaaagtgctctttgatgaattaggtttaacccctgtcacgcgtacagagaagaccggcaaacgttccacttcggcagccgccttggaagcacttcgtggtgtgcacccgatcgtcgagttgattttgcagtatcgcgagctcagcaaactcaaatcaacctatcttgataggttacctcgtcttgttcatccacgtacgggtcgtttacacacccgcttcaatcaaacggcaacagccaccgggcgcttgtcgtcgagtgacccgaacctccagaatattccagtgcgcacgccgctgggcatgcacattcgtaaagcgtttgttgcggatgaaggttggttattacttgcggccgattactcccagatcgaacttcgtgtattggcgcatctctctggcgacgagaatcttaaacgcgtgtttcgcgaaggcaaggatattcacactgaaaccgcagcctggatgttcggggtggactcggccttagtggaccccaagatgcgtcgtgccgccaagaccgtcaactttggcgtactctatggtatgtcagcagcacgtcttagtcaggaattgggcattgactacaaagaagctgaagcgtttatcgagcgctatttccaatcctttccgaaagttcgcgcgtggattgaacgtacgctcgaagaaggtcgcactcgcggctatgtggaaacgttattcgggcgtcgtcgctacgttccagatcttacgtctcgtgtccgctcagtgcgcgaagctgctgagcgtatggcctggaatatgcctgttcagggaacagcggcggacctcatgaagatcgccatggtgaaattgtttccgcgcttgaaacccttaggagcccaccttcttctgcaggtgcatgatgaactggtcttggaagtacccgaggatcgcgcagaagaagccaaagcactcgtgaaagaggttatggaaaacgcgtatccgttagatgttccgttggaggtcgaagtgggtgtaggccgtgattggcttgaagcgaaacaagactaatga

SEQ ID NO: 1338 - protein, 844 aa, synthetic construct
  REGION 1..844: note = DNA Polymerase Variant
MHHHHHHGGSGMLPLFDLEEPPKRVLLVDGHHLAYRTFYALSLTTSRGEPVQMVYGFARSLLKALKEGGQAVVVVFDAKAPSFRHEAYEAYKAGRAPTPEDFPRQLALVKRLVDLLGLVRLEAPGYEADDVLGTLAKKAEREGMEVHILTGDRDFFQLLSEKVSVLLPDGTLVTPKDVQEKYGVPPERWVDFRALTGDRSDNIPGVAGIGEKTALRLLAEWGSVENLLKNLDRVKPDSLRRKIEAHLEDLRLSLDLVRIRTDLPLEVDFKALRRRTPDLEGLRAFLEELELGSLLHEFGLLGGEKPREEAPWPPPEGAFVGFLLSRKEPMWAELLALAAAAEGRVHRATSPVEALADLKEARGFLAKDLVVLALREGVALDPTDDPLLVAYLLDSANTNPERVARRYGGEFTEDAAERALLSERLFQTLFPRLSEKLLWLYQEVERPLSRVLAHMEARGVRLDVPLLEALSFEAAKELERLEGEVFRLAGHPFNLNSRDQLEKVLFDELGLTPVTRTEKTGKRSTSAAALEALRGVHPIVELILQYRELSKLKSTYLDRLPRLVHPRTGRLHTRFNQTATATGRLSSSDPNLQNIPVRTPLGMHIRKAFVADEGWLLLAADYSQIELRVLAHLSGDENLKRVFREGKDIHTETAAWMFGVDSALVDPKMRRAAKTVNFGVLYGMSAARLSQELGIDYKEAEAFIERYFQSFPKVRAWIERTLEEGRTRGYVETLFGRRRYVPDLTSRVRSVREAAERMAWNMPVQGTAADLMKIAMVKLFPRLKPLGAHLLLQVHDELVLEVPEDRAEEAKALVKEVMENAYPLDVPLEVEVGVGRDWLEAKQD

SEQ ID NO: 1339 - DNA, 2538 bp, synthetic construct
  misc_feature 1..2538: note = DNA Polymerase Variant
  source 1..2538: mol_type = other DNA
atgcaccatcatcatcatcatggcggtagcggcatgttaccgctgtttgatttggaagaaccaccaaaacgcgtgctgcttgttgacggccatcatctggcgtatcgtaccttctacgcactgagccttacgacctcacgtggtgagcctacgcagatggtgtatgggtttgctcgctccctgctgaaagccctgaaggaagatggtcaagccgtagtagtggttttcgatgcgaaggcaccgtcgtttcgtcacgaagcgtacgaggcctataaagctggccgcgcaccgaccccggaagactttccgcgtcagttagcgctcgtcaaacgcctcgtggatttgctgggattagttcgcttggaagctcctggctacgaggcggacgacgtgctcggtacactggccaagaaagcagaacgtgaaggcatggaggtccatattcttaccggtgatcgcgatttcttccagctgctgtctgagaaagtgagcgttttgctgcccgatggcacgttagtaaccccgaaagatgtgcaagagaaatatggagttccgccagaacgttgggtggactttcgcgcactgactggtgatcgttcagacaacatcccgggcgttgccgggattggtgaaaagacggcgctgcgcctgctggcagaatggggctcggtggaaaatctgctcaagaaccttgatcgtgtgaaacctgatagcttacgccgcaagatcgaagcccacctggaagacttgcgcctgagtctggatcttgtacgtattcgcaccgatctgccgttggaagtagactttaaagctctgcgtcgtcgcacacccgatttagaggggttacgcgcgttcctcgaagaactggagctgggctccctgctgcatgaattcggtttgttgggcggagagaaaccgcgtgaagaagcaccatggccgccgcccgagggtgcctttgtcggctttcttctgtcacgcaaagagccaatgtgggcggaactgttagctcttgcagccgccgcggaagggcgtgttcaccgcgcgacctctcctgtcgaggccctcgctgacctcaaagaagcacgtggtttcttggcgaaagatttagtcgtgcttgcattacgcgaaggcgttgcgctcgatccgacggacgacccgcttttggtggcttatttgctcgatagcgcgaataccaacccggaacgtgtcgcccgtcgttacggcggcgagtttcgcgaagatgcggcagaacgcgcgttgcttagcgaacgcctcttccagacgttatttccacgtctttcggagaaattactctggctctatcaggaagtcgaacgtccattgagtcgcgtgcttgcccatatggaggctcgcggtgtgcgcttagatgttccgttgttagaagcactcagcttcgaggcggcaaaagaactggaacgtcttgaaggcgaagtctttcgtttagcggggcatcccttcaatctcaactctcgcgaccaattggagaaagtgctctttgatgaattaggtttaacccctgtcacgcgtacagagaagaccggcaaacgttccacttcggcagccgccttggaagcacttcgtggtgtgcacccgatcgtcgagttgattttgcagtatcgcgagctcagcaaactcaaatcaacctatcttgataggttacctcgtcttgttcatccacgtacgggtcgtttacacacccgcttcaatcaaacggcaacagccaccgggcgcttgtcgtcgagtgacccgaacctccagaatattccagtgcgcacgccgctgggcatgcacattcgtaaagcgtttgttgcggatgaaggttggttattacttgcggccgattactcccagatcgaacttcgtgtattggcgcatctctctggcgacgagaatcttaaacgcgtgtttcgcgaaggcaaggatattcacactgaaaccgcagcctggatgttcggggtggactcggccttagtggaccccaagatgcgtcgtgccgccaagaccgtcaactttggcgtactctatggtatgtcagcagcacgtcttagtcaggaattgggcattgactacaaagaagctgaagcgtttatcgagcgctatttccaatcctttccgaaagttcgcgcgtggattgaacgtacgctcgaagaaggtcgcactcgcggctatgtggaaacgttattcgggcgtcgtcgctacgttccagatcttacgtctcgtgtccgctcagtgcgcgaagctgctgagcgtatggcctggaatatgcctgttcagggaacagcggcggacctcatgaagatcgccatggtgaaattgtttccgcgcttgaaacccttaggagcccaccttcttctgcaggtgcatgatgaactggtcttggaagtacccgaggatcgcgcagaagaagccaaagcactcgtgaaagaggttatggaaaacgcgtatccgttagatgttccgttggaggtcgaagtgggtgtaggccgtgattggcttgaagcgaaacaagactaatga

SEQ ID NO: 1340 - protein, 844 aa, synthetic construct
  REGION 1..844: note = DNA Polymerase Variant
MHHHHHHGGSGMLPLFDLEEPPKRVLLVDGHHLAYRTFYALSLTTSRGEPTQMVYGFARSLLKALKEDGQAVVVVFDAKAPSFRHEAYEAYKAGRAPTPEDFPRQLALVKRLVDLLGLVRLEAPGYEADDVLGTLAKKAEREGMEVHILTGDRDFFQLLSEKVSVLLPDGTLVTPKDVQEKYGVPPERWVDFRALTGDRSDNIPGVAGIGEKTALRLLAEWGSVENLLKNLDRVKPDSLRRKIEAHLEDLRLSLDLVRIRTDLPLEVDFKALRRRTPDLEGLRAFLEELELGSLLHEFGLLGGEKPREEAPWPPPEGAFVGFLLSRKEPMWAELLALAAAAEGRVHRATSPVEALADLKEARGFLAKDLVVLALREGVALDPTDDPLLVAYLLDSANTNPERVARRYGGEFREDAAERALLSERLFQTLFPRLSEKLLWLYQEVERPLSRVLAHMEARGVRLDVPLLEALSFEAAKELERLEGEVFRLAGHPFNLNSRDQLEKVLFDELGLTPVTRTEKTGKRSTSAAALEALRGVHPIVELILQYRELSKLKSTYLDRLPRLVHPRTGRLHTRFNQTATATGRLSSSDPNLQNIPVRTPLGMHIRKAFVADEGWLLLAADYSQIELRVLAHLSGDENLKRVFREGKDIHTETAAWMFGVDSALVDPKMRRAAKTVNFGVLYGMSAARLSQELGIDYKEAEAFIERYFQSFPKVRAWIERTLEEGRTRGYVETLFGRRRYVPDLTSRVRSVREAAERMAWNMPVQGTAADLMKIAMVKLFPRLKPLGAHLLLQVHDELVLEVPEDRAEEAKALVKEVMENAYPLDVPLEVEVGVGRDWLEAKQD

SEQ ID NO: 1341 - DNA, 2538 bp, synthetic construct
  misc_feature 1..2538: note = DNA Polymerase Variant
  source 1..2538: mol_type = other DNA
atgcaccatcatcatcatcatggcggtagcggcatgttaccgctgtttgatttggaagaaccaccaaaacgcgtgctgcttgttgacggccatcatctggcgtatcgtaccttctacgcactgagccttacgacctcacgtggtgagcctgtccagatggtgtatgggtttgctcgctccctgctgaaagccctgaaggaagatggtcaagccgtagtagtggttttcgatgcgaaggcaccgtcgtttcgtcacgaagcgtacgaggcctataaagctggccgcgcaccgaccccggaagactttccgcgtcagttagcgctcgtcaaacgcctcgtggatttgctgggattagttcgcttggaagctcctggctacgaggcggacgacgtgctcggtacactggccaagaaagcagaacgtgaaggcatggaggtccatattcttaccggtgatcgcgatttcttccagctgctgtctgagaaagtgagcgttttgctgcccgatggcacgttagtaaccccgaaagatgtgcaagagaaatatggagttccgccagaacgttgggtggactttcgcgcactgactggtgatcgttcagacaacatcccgggcgttgccgggattggtgaaaagacggcgctgcgcctgctggcagaatggggctcggtggaaaatctgctcaagaaccttgatcgtgtgaaacctgatagcttacgccgcaagatcgaagcccacctggaagacttgcgtctgagtctggatcttgtacgtattcgcaccgatctgccgttggaagtagactttaaagctctgcgtcgtcgcacacccgatttagaggggttacgcgcgttcctcgaagaactggagctgggctccctgctgcatgaattcggtttgttgggcggagagaaaccgcgtgaagaagcaccatggccgccgcccgagggtgcctttgtcggctttcttctgtcacgcaaagagccaatgtgggcggaactgttagctcttgcagccgccgcggaagggcgtgttcaccgcgcgacctctcctgtcgaggccctcgctgacctcaaagaagcacgtggtttcttggcgaaagatttagccgtgcttgcattacgcgaaggcgttgcgctcgatccgacggacgacccgcttttggtggcttatttgctcgatagcgcgaataccaacccggaacgtgtcgcccgtcgttacggcggcgagtttcgcgaagatgcggcagaacgcgcgttgcttagcgaacgcctcttccagacgttatttccacgtctttcggagaaattactctggctctatcaggaagtcgaacgtccattgagtcgcgtgcttgcccatatggaggctcgcggtgtgcgcttagatgttccgttgttagaagcactcagcttcgaggcggcaaaagaactggaacgtcttgaaggcgaagtctttcgtttagcggggcatcccttcaatctcaactctcgcgaccaattggagaaagtgctctttgatgaattaggtttaacccctgtcacgcgtacagagaagaccggcaaacgttccacttcggcagccgccttggaagcacttcgtggtgtgcacccgatcgtcgagttgattttgcagtatcgcgagctcagcaaactcaaatcaacctatcttgataggttacctcgtcttgttcatccacgtacgggtcgtttacacacccgcttcaatcaaacggcaacagccaccgggcgcttgtcgtcgagtgacccgaacctccagaatattccagtgcgcacgccgctgggcatgcacattcgtaaagcgtttgttgcggaagaaggttggttattacttgcggccgattactcccagatcgaacttcgtgtattggcgcatctctctggcgacgagaatcttaaacgcgtgtttcgcgaaggcaaggatattcacactgaaaccgcagcctggatgttcggggtggactcggccttagtggaccccaagatgcgtcgtgccgccaagaccgtcaactttggcgtactctatggtatgtcagcagcacgtcttagtcaggaattgggcattgactacaaagaagctgaagcgtttatcgagcgctatttccaatcctttccgaaagttcgcgcgtggattgaacgtacgctcgaagaaggtcgcactcgcggctatgtggaaacgttattcgggcgtcgtcgctacgttccagatcttacgtctcgtgtccgctcagtgcgcgaagctgctgagcgtatggcctggaatatgcctgttcagggaacagcggcggacctcatgaagatcgccatggtgaaattgtttccgcgcttgaaacccttaggagcccaccttcttctgcaggtgcatgatgaaattgtcttggaagtacccgaggatcgcgcagaagaagccaaagcactcgtgaaagaggttatggaaaacgcgtatccgttagatgttccgttggaggtcgaagtgggtgtaggccgtgattggcttgaagcgaaacaagactaatga

SEQ ID NO: 1342 - protein, 844 aa, synthetic construct
  REGION 1..844: note = DNA Polymerase Variant
MHHHHHHGGSGMLPLFDLEEPPKRVLLVDGHHLAYRTFYALSLTTSRGEPVQMVYGFARSLLKALKEDGQAVVVVFDAKAPSFRHEAYEAYKAGRAPTPEDFPRQLALVKRLVDLLGLVRLEAPGYEADDVLGTLAKKAEREGMEVHILTGDRDFFQLLSEKVSVLLPDGTLVTPKDVQEKYGVPPERWVDFRALTGDRSDNIPGVAGIGEKTALRLLAEWGSVENLLKNLDRVKPDSLRRKIEAHLEDLRLSLDLVRIRTDLPLEVDFKALRRRTPDLEGLRAFLEELELGSLLHEFGLLGGEKPREEAPWPPPEGAFVGFLLSRKEPMWAELLALAAAAEGRVHRATSPVEALADLKEARGFLAKDLAVLALREGVALDPTDDPLLVAYLLDSANTNPERVARRYGGEFREDAAERALLSERLFQTLFPRLSEKLLWLYQEVERPLSRVLAHMEARGVRLDVPLLEALSFEAAKELERLEGEVFRLAGHPFNLNSRDQLEKVLFDELGLTPVTRTEKTGKRSTSAAALEALRGVHPIVELILQYRELSKLKSTYLDRLPRLVHPRTGRLHTRFNQTATATGRLSSSDPNLQNIPVRTPLGMHIRKAFVAEEGWLLLAADYSQIELRVLAHLSGDENLKRVFREGKDIHTETAAWMFGVDSALVDPKMRRAAKTVNFGVLYGMSAARLSQELGIDYKEAEAFIERYFQSFPKVRAWIERTLEEGRTRGYVETLFGRRRYVPDLTSRVRSVREAAERMAWNMPVQGTAADLMKIAMVKLFPRLKPLGAHLLLQVHDEIVLEVPEDRAEEAKALVKEVMENAYPLDVPLEVEVGVGRDWLEAKQD

SEQ ID NO: 1343 - DNA, 2538 bp, synthetic construct
  misc_feature 1..2538: note = DNA Polymerase Variant
  source 1..2538: mol_type = other DNA
atgcaccatcatcatcatcatggcggtagcggcatgttaccgctgtttgatttggaagaaccaccaaaacgcgtgctgcttgttgacggccatcatctggcgtatcgtaccttctacgcactgagccttacgacctcacgtggtgagcctgtccagatggtgtatgggtttgctcgctccctgctgaaagccctgaaggaagatggtcaagccgtagtagtggttttcgatgcgaaggcaccgtcgtttcgtcacgaagcgtacgaggcctataaagctggccgcgcaccgaccccggaagactttccgcgtcagttagcgctcgtcaaacgcctcgtggatttgctgggattagttcgcttggaagctcctggctacgaggcggacgacgtgctcggtacactggccaagaaagcagaacgtgaaggcatggaggtccatattcttaccggtgatcgcgatttcttccagctgctgtctgagaaagtgagcgttttgctgcccgatggcacgttagtaaccccgaaagatgtgcaagagaaatatggagttccgccagaacgttgggtggactttcgcgcactgactggtgatcgttcagacaacatcccgggcgttgccgggattggtgaaaagacggcgctgcgcctgctggcagaatggggctcggtggaaaatctgctcaagaaccttgatcgtgtgaaacctgatagcttacgccgcaagatcgaagcccacctggaagacttgattctgagtctggatcttgtacgtattcgcaccgatctgccgttggaagtagactttaaagctctgcgtcgtcgcacacccgatttagaggggttacgcgcgttcctcgaagaactggagctgggctccctgctgcatgaattcggtttgttgggcggagagaaaccgcgtgaagaagcaccatggccgccgcccgagggtgcctttgtcggctttcttctgtcacgcaaagagccaatgtgggcggaactgttagctcttgcagccgccgcggaagggcgtgttcaccgcgcgacctctcctgtcgaggccctcgctgacctcaaagaagcacgtggtttcttggcgaaagatttagtcgtgcttgcattacgcgaaggcgttgcgctcgatccgacggacgacccgcttttggtggcttatttgctcgatagcgcgaataccaacccggaacgtgtcgcccgtcgttacggcggcgagtttcgcgaagatgcggcagaacgcgcgttgcttagcgaacgcctcttccagacgttatttccacgtctttcggagaaattactctggctctatcaggaagtcgaacgtccattgagtcgcgtgcttgcccatatggaggctcgcggtgtgcgcttagatgttccgttgttagaagcactcagcttcgaggcggcaaaagaactggaacgtcttgaaggcgaagtctttcgtttagcggggcatcccttcaatctcaactctcgcgaccaattggagaaagtgctctttgatgaattaggtttaacccctgtcacgcgtacagagaagaccggcaaacgttccacttcggcagccgccttggaagcacttcgtggtgtgcacccgatcgtcgagttgattttgcagtatcgcgagctcagcaaactcaaatcaacctatcttgataggttacctcgtcttgttcatccacgtacgggtcgtttacacacccgcttcaatcaaacggcaacagccaccgggcgcttgtcgtcgagtgacccgaacctccagaatattccagtgcgcacgccgctgggccagcacattcgtaaagcgtttgttgcggatgaaggttggttattacttgcggccgattactcccagatcgaacttcgtgtattggcgcatctctctggcgacgagaatcttaaacgcgtgtttcgcgaaggcaaggatattcacactgaaaccgcagcctggatgttcggggtggactcggccttagtggaccccaagatgcgtcgtgccgccaagaccgtcaactttggcgtactctatggtatgtcagcagcacgtcttagtcaggaattgggcattgactacaaagaagctgaagcgtttatcgagcgctatttccaatcctttccgaaagttcgcgcgtggattgaacgtacgctcgaagaaggtcgcactcgcggctatgtggaaacgttattcgggcgtcgtcgctacgttccagatcttacgtctcgtgtccgctcagtgcgcgaagctgctgagcgtatggcctggaatatgcctgttcagggaacagcggcggacctcatgaagatcgccatggtgaaattgtttccgcgcttgaaacccttaggagcccaccttcttctgcaggtgcatgatgaactggtcttggaagtacccgaggatcgcgcagaagaagccaaagcactcgtgaaagaggttatggaaaacgcgtatccgttagatgttccgttggaggtcgaagtgggtgtaggccgtgattggcttgaagcgaaacaagactaatga

SEQ ID NO: 1344 - protein, 844 aa, synthetic construct
  REGION 1..844: note = DNA Polymerase Variant
MHHHHHHGGSGMLPLFDLEEPPKRVLLVDGHHLAYRTFYALSLTTSRGEPVQMVYGFARSLLKALKEDGQAVVVVFDAKAPSFRHEAYEAYKAGRAPTPEDFPRQLALVKRLVDLLGLVRLEAPGYEADDVLGTLAKKAEREGMEVHILTGDRDFFQLLSEKVSVLLPDGTLVTPKDVQEKYGVPPERWVDFRALTGDRSDNIPGVAGIGEKTALRLLAEWGSVENLLKNLDRVKPDSLRRKIEAHLEDLILSLDLVRIRTDLPLEVDFKALRRRTPDLEGLRAFLEELELGSLLHEFGLLGGEKPREEAPWPPPEGAFVGFLLSRKEPMWAELLALAAAAEGRVHRATSPVEALADLKEARGFLAKDLVVLALREGVALDPTDDPLLVAYLLDSANTNPERVARRYGGEFREDAAERALLSERLFQTLFPRLSEKLLWLYQEVERPLSRVLAHMEARGVRLDVPLLEALSFEAAKELERLEGEVFRLAGHPFNLNSRDQLEKVLFDELGLTPVTRTEKTGKRSTSAAALEALRGVHPIVELILQYRELSKLKSTYLDRLPRLVHPRTGRLHTRFNQTATATGRLSSSDPNLQNIPVRTPLGQHIRKAFVADEGWLLLAADYSQIELRVLAHLSGDENLKRVFREGKDIHTETAAWMFGVDSALVDPKMRRAAKTVNFGVLYGMSAARLSQELGIDYKEAEAFIERYFQSFPKVRAWIERTLEEGRTRGYVETLFGRRRYVPDLTSRVRSVREAAERMAWNMPVQGTAADLMKIAMVKLFPRLKPLGAHLLLQVHDELVLEVPEDRAEEAKALVKEVMENAYPLDVPLEVEVGVGRDWLEAKQD

SEQ ID NO: 1345 - DNA, 2538 bp, synthetic construct
  misc_feature 1..2538: note = DNA Polymerase Variant
  source 1..2538: mol_type = other DNA
atgcaccatcatcatcatcatggcggtagcggcatgttaccgctgtttgatttggaagaaccaccaaaacgcgtgctgcttgttgacggccatcatctggcgtatcgtaccttctacgcactgagccttacgacctcacgtggtgagcctgtccagatggtgtatgggtttgctcgctccctgctgaaagccctgaaggaagatggtcaagccgtagtagtggttttcgatgcgaaggcaccgtcgtttcgtcacgaagcgtacgaggcctataaagctggccgcgcaccgaccccggaagactttccgcgtcagttagcgctcgtcaaacgcctcgtggatttgctgggattagttcgcttggaagctcctggctacgaggcggacgacgtgctcggtacactggccaagaaagcagaacgtgaaggcatggaggtccatattcttaccggtgatcgcgatttcttccagctgctgtctgagaaagtgagcgttttgctgcccgatggcacgttagtaaccccgaaagatgtgcaagagaaatatggagttccgccagaacgttgggtggactttcgcgcactgactggtgatcgttcagacaacatcccgggcgttgccgggattggtgaaaagacggcgctgcgcctgctggcagaatggggctcggtggaaaatctgctcaagaaccttgatcgtgtgaaacctgatagcttacgccgcaagatcgaagcccacctggaagacttgcgtctgagtctggatcttgtacgtattcgcaccgatctgccgttggaagtagactttaaagctctgcgtcgtcgcacacccgatttagaggggttacgcgcgttcctcgaagaactggagctgggctccctgctgcatgaattcggtttgttgggcggagagaaaccgcgtgaagaagcaccatggccgccgcccgagggtgcctttgtcggctttcttctgtcacgcaaagagccaatgtgggcggaactgttagctcttgcagccgccgcggaagggcgtgttcaccgcgcgacctctcctgtcgaggccctcgctgacctcaaagaagcacgtggtttcttggcgaaagatttagtcgtgcttgcattacgcgaaggcgttgcgctcgatccgacggacgacccgcttttggtggcttatttgctcgatagcgcgaataccaacccggaacgtgtcgcccgtcgttacggcggcgagtttactgaagatgcggcagaacgcgcgttgcttagcgaacgcctcttccagacgttatttccacgtctttcggagaaattactctggctctatcaggaagtcgaacgtccattgagtcgcgtgcttgcccatatggaggctcgcggtgtgcgcttagatgttccgttgttagaagcactcagcttcgaggcggcaaaagaactggaacgtcttgaaggcgaagtctttcgtttagcggggcatcccttcaatctcaactctcgcgaccaattggagaaagtgctctttgatgaattaggtttaacccctgtcacgcgtacagagaagaccggcaaacgttccacttcggcagccgccttggaagcacttcgtggtgtgcacccgatcgtcgagttgattttgcagtatcgcgagctcagcaaactcaaatcaacctatcttgataggttacctcgtcttgttcatccacgtacgggtcgtttacacacccgcttcaatcaaacggcaacagccaccgggcgcttgtcgtcgagtgacccgaacctccagaatattccagtgcgcacgccgctgggccagcacattcgtaaagcgtttgttgcggaagaaggttggttattacttgcggccgattactcccagatcgaacttcgtgtattggcgcatctctctggcgacgagaatcttaaacgcgtgtttcgcgaaggcaaggatattcacactgaaaccgcagcctggatgttcggggtggactcggccttagtggaccccaagatgcgtcgtgccgccaagaccgtcaactttggcgtactctatggtatgtcagcagcacgtcttagtcaggaattgggcattgactacaaagaagctgaagcgtttatcgagcgctatttccaatcctttccgaaagttcgcgcgtggattgaacgtacgctcgaagaaggtcgcactcgcggctatgtggaaacgttattcgggcgtcgtcgctacgttccagatcttacgtctcgtgtccgctcagtgcgcgaagctgctgagcgtatggcctggaatatgcctgttcagggaacagcggcggacctcatgaagatcgccatggtgaaattgtttccgcgcttgaaacccttaggagcccaccttcttctgcaggtgcatgatgaaattgtcttggaagtacccgaggatcgcgcagaagaagccaaagcactcgtgaaagaggttatggaaaacgcgtatccgttagatgttccgttggaggtcgaagtgggtgtaggccgtgattggcttgaagcgaaacaagactaatga

SEQ ID NO: 1346 - protein, 844 aa, synthetic construct
  REGION 1..844: note = DNA Polymerase Variant
MHHHHHHGGSGMLPLFDLEEPPKRVLLVDGHHLAYRTFYALSLTTSRGEPVQMVYGFARSLLKALKEDGQAVVVVFDAKAPSFRHEAYEAYKAGRAPTPEDFPRQLALVKRLVDLLGLVRLEAPGYEADDVLGTLAKKAEREGMEVHILTGDRDFFQLLSEKVSVLLPDGTLVTPKDVQEKYGVPPERWVDFRALTGDRSDNIPGVAGIGEKTALRLLAEWGSVENLLKNLDRVKPDSLRRKIEAHLEDLRLSLDLVRIRTDLPLEVDFKALRRRTPDLEGLRAFLEELELGSLLHEFGLLGGEKPREEAPWPPPEGAFVGFLLSRKEPMWAELLALAAAAEGRVHRATSPVEALADLKEARGFLAKDLVVLALREGVALDPTDDPLLVAYLLDSANTNPERVARRYGGEFTEDAAERALLSERLFQTLFPRLSEKLLWLYQEVERPLSRVLAHMEARGVRLDVPLLEALSFEAAKELERLEGEVFRLAGHPFNLNSRDQLEKVLFDELGLTPVTRTEKTGKRSTSAAALEALRGVHPIVELILQYRELSKLKSTYLDRLPRLVHPRTGRLHTRFNQTATATGRLSSSDPNLQNIPVRTPLGQHIRKAFVAEEGWLLLAADYSQIELRVLAHLSGDENLKRVFREGKDIHTETAAWMFGVDSALVDPKMRRAAKTVNFGVLYGMSAARLSQELGIDYKEAEAFIERYFQSFPKVRAWIERTLEEGRTRGYVETLFGRRRYVPDLTSRVRSVREAAERMAWNMPVQGTAADLMKIAMVKLFPRLKPLGAHLLLQVHDEIVLEVPEDRAEEAKALVKEVMENAYPLDVPLEVEVGVGRDWLEAKQD

SEQ ID NO: 1347 - DNA, 2538 bp, synthetic construct
  misc_feature 1..2538: note = DNA Polymerase Variant
  source 1..2538: mol_type = other DNA
atgcaccatcatcatcatcatggcggtagcggcatgttaccgctgtttgatttggaagaaccaccaaaacgcgtgctgcttgttgacggccatcatctggcgtatcgtaccttctacgcactgagccttacgacctcacgtggtgagcctgtccagatggtgtatgggtttgctcgctccctgctgaaagccctgaaggaagatggtcaagccgtagtagtggttttcgataacaaggcaccgtcgtttcgtcacgaagcgtacgaggcctataaagctggccgcgcaccgaccccggaagactttccgcgtcagttagcgctcgtcaaacgcctcgtggatttgctgggattagttcgcttggaagctcctggctacgaggcggacgacgtgctcggtacactggccaagaaagcagaacgtgaaggcatggaggtccatattcttaccggtgatcgcgatttcttccagctgctgtctgagaaagtgagcgttttgctgcccgatggcacgttagtaaccccgaaagatgtgcaagagaaatatggagttccgccagaacgttgggtggactttcgcgcactgactggtgatcgttcagacaacatcccgggcgttgccgggattggtgaaaagacggcgctgcgcctgctggcagaatggggctcggtggaaaatctgctcaagaaccttgatcgtgtgaaacctgatagcttacgccgcaagatcgaagcccacctggaagacttgattctgagtctggatcttgtacgtattcgcaccgatctgccgttggaagtagactttaaagctctgcgtcgtcgcacacccgatttagaggggttacgcgcgttcctcgaagaactggagctgggctccctgctgcatgaattcggtttgttgggcggagagaaaccgcgtgaagaagcaccatggccgccgcccgagggtgcctttgtcggctttcttctgtcacgcaaagagccaatgtgggcggaactgttagctcttgcagccgccgcggaagggcgtgttcaccgcgcgacctctcctgtcgaggccctcgctgacctcaaagaagcacgtggtttcttggcgaaagatttagccgtgcttgcattacgcgaaggcgttgcgctcgatccgacggacgacccgcttttggtggcttatttgctcgatagcgcgaataccaacccggaacgtgtcgcccgtcgttacggcggcgagtttactgaagatgcggcagaacgcgcgttgcttagcgaacgcctcttccagacgttatttccacgtctttcggagaaattactctggctctatcaggaagtcgaacgtccattgagtcgcgtgcttgcccatatggaggctcgcggtgtgcgcttagatgttccgttgttagaagcactcagcttcgaggcggcaaaagaactggaacgtcttgaaggcgaagtctttcgtttagcggggcatcccttcaatctcaactctcgcgaccaattggagaaagtgctctttgatgaattaggtttaacccctgtcacgcgtacagagaagaccggcaaacgttccacttcggcagccgccttggaagcacttcgtggtgtgcacccgatcgtcgagttgattttgcagtatcgcgagctcagcaaactcaaatcaacctatcttgataggttacctcgtcttgttcatccacgtacgggtcgtttacacacccgcttcaatcaaacggcaacagccaccgggcgcttgtcgtcgagtgacccgaacctccagaatattccagtgcgcacgccgctgggccagcacattcgtaaagcgtttgttgcggaagaaggttggttattacttgcggccgattactcccagatcgaacttcgtgtattggcgcatctctctggcgacgagaatcttaaacgcgtgtttcgcgaaggcaaggatattcacactgaaaccgcagcctggatgttcggggtggactcggccttagtggaccccaagatgcgtcgtgccgccaagaccgtcaactttggcgtactctatggtatgtcagcagcacgtcttagtcaggaattgggcattgactacaaagaagctgaagcgtttatcgagcgctatttccaatcctttccgaaagttcgcgcgtggattgaacgtacgctcgaagaaggtcgcactcgcggctatgtggaaacgttattcgggcgtcgtcgctacgttccagatcttacgtctcgtgtccgctcagtgcgcgaagctgctgagcgtatggcctggaatatgcctgttcagggaacagcggcggacctcatgaagatcgccatggtgaaattgtttccgcgcttgaaacccttaggagcccaccttcttctgcaggtgcatgatgaattggtcttggaagtacccgaggatcgcgcagaagaagccaaagcactcgtgaaagaggttatggaaaacgcgtatccgttagatgttccgttggaggtcgaagtgggtgtaggccgtgattggcttgaagcgaaacaagactaatga

SEQ ID NO: 1348 - protein, 844 aa, synthetic construct
  REGION 1..844: note = DNA Polymerase Variant
MHHHHHHGGSGMLPLFDLEEPPKRVLLVDGHHLAYRTFYALSLTTSRGEPVQMVYGFARSLLKALKEDGQAVVVVFDNKAPSFRHEAYEAYKAGRAPTPEDFPRQLALVKRLVDLLGLVRLEAPGYEADDVLGTLAKKAEREGMEVHILTGDRDFFQLLSEKVSVLLPDGTLVTPKDVQEKYGVPPERWVDFRALTGDRSDNIPGVAGIGEKTALRLLAEWGSVENLLKNLDRVKPDSLRRKIEAHLEDLILSLDLVRIRTDLPLEVDFKALRRRTPDLEGLRAFLEELELGSLLHEFGLLGGEKPREEAPWPPPEGAFVGFLLSRKEPMWAELLALAAAAEGRVHRATSPVEALADLKEARGFLAKDLAVLALREGVALDPTDDPLLVAYLLDSANTNPERVARRYGGEFTEDAAERALLSERLFQTLFPRLSEKLLWLYQEVERPLSRVLAHMEARGVRLDVPLLEALSFEAAKELERLEGEVFRLAGHPFNLNSRDQLEKVLFDELGLTPVTRTEKTGKRSTSAAALEALRGVHPIVELILQYRELSKLKSTYLDRLPRLVHPRTGRLHTRFNQTATATGRLSSSDPNLQNIPVRTPLGQHIRKAFVAEEGWLLLAADYSQIELRVLAHLSGDENLKRVFREGKDIHTETAAWMFGVDSALVDPKMRRAAKTVNFGVLYGMSAARLSQELGIDYKEAEAFIERYFQSFPKVRAWIERTLEEGRTRGYVETLFGRRRYVPDLTSRVRSVREAAERMAWNMPVQGTAADLMKIAMVKLFPRLKPLGAHLLLQVHDELVLEVPEDRAEEAKALVKEVMENAYPLDVPLEVEVGVGRDWLEAKQD

SEQ ID NO: 1349 - DNA, 2538 bp, synthetic construct
  misc_feature 1..2538: note = DNA Polymerase Variant
  source 1..2538: mol_type = other DNA
atgcaccatcatcatcatcatggcggtagcggcatgttaccgctgtttgatttggaagaaccaccaaaacgcgtgctgcttgttgacggccatcatctggcgtatcgtaccttctacgcactgagccttacgacctcacgtggtgagcctgtccagatggtgtatgggtttgctcgctccctgctgaaagccctgaaggaagatggtcaagccgtagtagtggttttcgatgcgaaggcaccgtcgtttcgtcacgaagcgtacgaggcctataaagctggccgcgcaccgaccccggaagactttccgcgtcagttagcgctcgtcaaacgcctcgtggatttgctgggattagttcgcttggaagctcctggctacgaggcggacgacgtgctcggtacactggccaagaaagcagaacgtgaaggcatggaggtccatattcttaccggtgatcgcgatttcttccagctgctgtctgagaaagtgagcgttttgctgcccgatggcacgttagtaaccccgaaagatgtgcaagagaaatatggagttccgccagaacgttgggtggactttcgcgcactgactggtgatcgttcagacaacatcccgggcgttgccgggattggtgaaaagacggcgctgcgcctgctggcagaatggggctcggtggaaaatctgctcaagaaccttgatcgtgtgaaacctgatagcttacgccgcaagatcgaagcccacctggaagacttgattctgagtctggatcttgtacgtattcgcaccgatctgccgttggaagtagactttaaagctctgcgtcgtcgcacacccgatttagaggggttacgcgcgttcctcgaagaactggagctgggctccctgctgcatgaattcggtttgttgggcggagagaaaccgcgtgaagaagcaccatggccgccgcccgagggtgcctttgtcggctttcttctgtcacgcaaagagccaatgtgggcggaactgttagctcttgcagccgccgcggaagggcgtgttcaccgcgcgacctctcctgtcgaggccctcgctgacctcaaagaagcacgtggtttcttggcgaaagatttagccgtgcttgcattacgcgaaggcgttgcgctcgatccgacggacgacccgcttttggtggcttatttgctcgatagcgcgaataccaacccggaacgtgtcgcccgtcgttacggcggcgagtttactgaagatgcggcagaacgcgcgttgcttagcgaacgcctcttccagacgttatttccacgtctttcggagaaattactctggctctatcaggaagtcgaacgtccattgagtcgcgtgcttgcccatatggaggctcgcggtgtgcgcttagatgttccgttgttagaagcactcagcttcgaggcggcaaaagaactggaacgtcttgaaggcgaagtctttcgtttagcggggcatcccttcaatctcaactctcgcgaccaattggagaaagtgctctttgatgaattaggtttaacccctgtcacgcgtacagagaagaccggcaaacgttccacttcggcagccgccttggaagcacttcgtggtgtgcacccgatcgtcgagttgattttgcagtatcgcgagctcagcaaactcaaatcaacctatcttgataggttacctcgtcttgttcatccacgtacgggtcgtttacacacccgcttcaatcaaacggcaacagccaccgggcgcttgtcgtcgagtgacccgaacctccagaatattccagtgcgcacgccgctgggccaacacattcgtaaagcgtttgttgcggaagaaggttggttattacttgcggccgattactcccagatcgaacttcgtgtattggcgcatctctctggcgacgagaatcttaaacgcgtgtttcgcgaaggcaaggatattcacactgaaaccgcagcctggatgttcggggtggactcggccttagtggaccccaagatgcgtcgtgccgccaagaccgtcaactttggcgtactctatggtatgtcagcagcacgtcttagtcaggaattgggcattgactacaaagaagctgaagcgtttatcgagcgctatttccaatcctttccgaaagttcgcgcgtggattgaacgtacgctcgaagaaggtcgcactcgcggctatgtggaaacgttattcgggcgtcgtcgctacgttccagatcttacgtctcgtgtccgctcagtgcgcgaagctgctgagcgtatggcctggaatatgcctgttcagggaacagcggcggacctcatgaagatcgccatggtgaaattgtttccgcgcttgaaacccttaggagcccaccttcttctgcaggtgcatgatgaactggtcttggaagtacccgaggatcgcgcagaagaagccaaagcactcgtgaaagaggttatggaaaacgcgtatccgttagatgttccgttggaggtcgaagtgggtgtaggccgtgattggcttgaagcgaaacaagactaatga

SEQ ID NO: 1350 - protein, 844 aa, synthetic construct
  REGION 1..844: note = DNA Polymerase Variant
MHHHHHHGGSGMLPLFDLEEPPKRVLLVDGHHLAYRTFYALSLTTSRGEPVQMVYGFARSLLKALKEDGQAVVVVFDAKAPSFRHEAYEAYKAGRAPTPEDFPRQLALVKRLVDLLGLVRLEAPGYEADDVLGTLAKKAEREGMEVHILTGDRDFFQLLSEKVSVLLPDGTLVTPKDVQEKYGVPPERWVDFRALTGDRSDNIPGVAGIGEKTALRLLAEWGSVENLLKNLDRVKPDSLRRKIEAHLEDLILSLDLVRIRTDLPLEVDFKALRRRTPDLEGLRAFLEELELGSLLHEFGLLGGEKPREEAPWPPPEGAFVGFLLSRKEPMWAELLALAAAAEGRVHRATSPVEALADLKEARGFLAKDLAVLALREGVALDPTDDPLLVAYLLDSANTNPERVARRYGGEFTEDAAERALLSERLFQTLFPRLSEKLLWLYQEVERPLSRVLAHMEARGVRLDVPLLEALSFEAAKELERLEGEVFRLAGHPFNLNSRDQLEKVLFDELGLTPVTRTEKTGKRSTSAAALEALRGVHPIVELILQYRELSKLKSTYLDRLPRLVHPRTGRLHTRFNQTATATGRLSSSDPNLQNIPVRTPLGQHIRKAFVAEEGWLLLAADYSQIELRVLAHLSGDENLKRVFREGKDIHTETAAWMFGVDSALVDPKMRRAAKTVNFGVLYGMSAARLSQELGIDYKEAEAFIERYFQSFPKVRAWIERTLEEGRTRGYVETLFGRRRYVPDLTSRVRSVREAAERMAWNMPVQGTAADLMKIAMVKLFPRLKPLGAHLLLQVHDELVLEVPEDRAEEAKALVKEVMENAYPLDVPLEVEVGVGRDWLEAKQD

SEQ ID NO: 1351 - DNA, 2538 bp, synthetic construct
  misc_feature 1..2538: note = DNA Polymerase Variant
  source 1..2538: mol_type = other DNA
atgcaccatcatcatcatcatggcggtagcggcatgttaccgctgtttgatttggaagaaccaccaaaacgcgtgctgcttgttgacggccatcatctggcgtatcgtaccttctacgcactgagccttacgacctcacgtggtgagcctgtccagatggtgtatgggtttgctcgctccctgctgaaagccctgaaggaacgcggtcaagccgtagtagtggttttcgatgcgaaggcaccgtcgtttcgtcacgaagcgtacgaggcctataaagctggccgcgcaccgaccccggaagactttccgcgtcagttagcgctcgtcaaacgcctcgtggatttgctgggattagttcgcttggaagctcctggctacgaggcggacgacgtgctcggtacactggccaagaaagcagaacgtgaaggcatggaggtccatattcttaccggtgatcgcgatttcttccagctgctgtctgagaaagtgagcgttttgctgcccgatggcacgttagtaaccccgaaagatgtgcaagagaaatatggagttccgccagaacgttgggtggactttcgcgcactgactggtgatcgttcagacaacatcccgggcgttgccgggattggtgaaaagacggcgctgcgcctgctggcagaatggggctcggtggaaaatctgctcaagaaccttgatcgtgtgaaacctgatagcttacgccgcaagatcgaagcccacctggaagacttgcgcctgagtctggatcttgtacgtattcgcaccgatctgccgttggaagtagactttaaagctctgcgtcgtcgcacacccgatttagaggggttacgcgcgttcctcgaagaactggagctgggctccctgctgcatgaattcggtttgttgggcggagagaaaccgcgtgaagaagcaccatggccgccgcccgagggtgcctttgtcggctttcttctgtcacgcaaagagccaatgtgggcggaactgttagctcttgcagccgccgcggaagggcgtgttcaccgcgcgacctctcctgtcgaggccctcgctgacctcaaagaagcacgtggtttcttggcgaaagatttagtcgtgcttgcattacgcgaaggcgttgcgctcgatccgacggacgacccgcttttggtggcttatttgctcgatagcgcgaataccaacccggaacgtgtcgcccgtcgttacggcggcgagtttactgaagatgcggcagaacgcgcgttgcttagcgaacgcctcttccagacgttatttccacgtctttcggagaaattactctggctctatcaggaagtcgaacgtccattgagtcgcgtgcttgcccatatggaggctcgcggtgtgcgcttagatgttccgttgttagaagcactcagcttcgaggcggcaaaagaactggaacgtcttgaaggcgaagtctttcgtttagcggggcatcccttcaatctcaactctcgcgaccaattggagaaagtgctctttgataaattaggtttaacccctgtcacgcgtacagagaagaccggcaaacgttccacttcggcagccgccttggaagcacttcgtggtgtgcacccgatcgtcgagttgattttgcagtatcgcgagctcagcaaactcaaatcaacctatcttgataggttacctcgtcttgttcatccacgtacgggtcgtttacacacccgcttcaatcaaacggcaacagccaccgggcgcttgtcgtcgagtgacccgaacctccagaatattccagtgcgcacgccgctgggccagcacattcgtaaagcgtttgttgcggaagaaggttggttattacttgcggccgattactcccagatcgaacttcgtgtattggcgcatctctctggcgacgagaatcttaaacgcgtgtttcgcgaaggcaaggatattcacactgaaaccgcagcctggatgttcggggtggactcggccttagtggaccccaagatgcgtcgtgccgccaagaccgtcaactttggcgtactctatggtatgtcagcagcacgtcttagtcaggaattgggcattgactacaaagaagctgaagcgtttatcgagcgctatttccaatcctttccgaaagttcgcgcgtggattgaacgtacgctcgaagaaggtcgcactcgcggctatgtggaaacgttattcgggcgtcgtcgctacgttccagatcttacgtctcgtgtccgctcagtgcgcgaagctgctgagcgtatggcctggaatatgcctgttcagggaacagcggcggacctcatgaagatcgccatggtgaaattgtttccgcgcttgaaacccttaggagcccaccttcttctgcaggtgcatgatgaaattgtcttggaagtacccgaggatcgcgcagaagaagccaaagcactcgtgaaagaggttatggaaaacgcgtatccgttagatgttccgttggaggtcgaagtgggtgtaggccgtgattggcttgaagcgaaacaagactaatga

SEQ ID NO: 1352 - protein, 844 aa, synthetic construct
  REGION 1..844: note = DNA Polymerase Variant
MHHHHHHGGSGMLPLFDLEEPPKRVLLVDGHHLAYRTFYALSLTTSRGEPVQMVYGFARSLLKALKERGQAVVVVFDAKAPSFRHEAYEAYKAGRAPTPEDFPRQLALVKRLVDLLGLVRLEAPGYEADDVLGTLAKKAEREGMEVHILTGDRDFFQLLSEKVSVLLPDGTLVTPKDVQEKYGVPPERWVDFRALTGDRSDNIPGVAGIGEKTALRLLAEWGSVENLLKNLDRVKPDSLRRKIEAHLEDLRLSLDLVRIRTDLPLEVDFKALRRRTPDLEGLRAFLEELELGSLLHEFGLLGGEKPREEAPWPPPEGAFVGFLLSRKEPMWAELLALAAAAEGRVHRATSPVEALADLKEARGFLAKDLVVLALREGVALDPTDDPLLVAYLLDSANTNPERVARRYGGEFTEDAAERALLSERLFQTLFPRLSEKLLWLYQEVERPLSRVLAHMEARGVRLDVPLLEALSFEAAKELERLEGEVFRLAGHPFNLNSRDQLEKVLFDKLGLTPVTRTEKTGKRSTSAAALEALRGVHPIVELILQYRELSKLKSTYLDRLPRLVHPRTGRLHTRFNQTATATGRLSSSDPNLQNIPVRTPLGQHIRKAFVAEEGWLLLAADYSQIELRVLAHLSGDENLKRVFREGKDIHTETAAWMFGVDSALVDPKMRRAAKTVNFGVLYGMSAARLSQELGIDYKEAEAFIERYFQSFPKVRAWIERTLEEGRTRGYVETLFGRRRYVPDLTSRVRSVREAAERMAWNMPVQGTAADLMKIAMVKLFPRLKPLGAHLLLQVHDEIVLEVPEDRAEEAKALVKEVMENAYPLDVPLEVEVGVGRDWLEAKQD

SEQ ID NO: 1353 - DNA, 2538 bp, synthetic construct
  misc_feature 1..2538: note = DNA Polymerase Variant
  source 1..2538: mol_type = other DNA
atgcaccatcatcatcatcatggcggtagcggcatgttaccgctgtttgatttggaagaaccaccaaaacgcgtgctgcttgttgacggccatcatctggcgtatcgtaccttctacgcactgagccttacgacctcacgtggtgagcctgtccagatggtgtatgggtttgctcgctccctgctgaaagccctgaaggaagatggtcaagccgtagtagtggttttcgatgcgaaggcaccgtcgtttcgtcacgaagcgtacgaggcctataaagctggccgcgcaccgaccccggaagactttccgcgtcagttagcgctcgtcaaacgcctcgtggatttgctgggattagttcgcttggaagctcctggctacgaggcggacgacgtgctcggtacactggccaagaaagcagaacgtgaaggcatggaggtccatattcttaccggtgatcgcgatttcttccagctgctgtctgagaaagtgagcgttttgctgcccgatggcacgttagtaaccccgaaagatgtgcaagagaaatatggagttccgccagaacgttgggtggactttcgcgcactgactggtgatcgttcagacaacatcccgggcgttgccgggattggtgaaaagacggcgctgcgcctgctggcagaatggggctcggtggaaaatctgctcaagaaccttgatcgtgtgaaacctgatagcttacgccgcaagatcgaagcccacctggaagacttgattctgagtctggatcttgtacgtattcgcaccgatctgccgttggaagtagactttaaagctctgcgtcgtcgcacacccgatttagaggggttacgcgcgttcctcgaagaactggagctgggctccctgctgcatgaattcggtttgttgggcggagagaaaccgcgtgaagaagcaccatggccgccgcccgagggtgcctttgtcggctttcttctgtcacgcaaagagccaatgtgggcggaactgttagctcttgcagccgccgcggaagggcgtgttcaccgcgcgacctctcctgtcgaggccctcgctgacctcaaagaagcacgtggtttcttggcgaaagatttagtcgtgcttgcattacgcgaaggcgttgcgctcgatccgacggacgacccgcttttggtggcttatttgctcgatagcgcgaataccaacccggaacgtgtcgcccgtcgttacggcggcgagtttactgaagatgcggcagaacgcgcgttgcttagcgaacgcctcttccagacgttatttccacgtctttcggagaaattactctggctctatcaggaagtcgaacgtccattgagtcgcgtgcttgcccatatggaggctcgcggtgtgcgcttagatgttccgttgttagaagcactcagcttcgaggcggcaaaagaactggaacgtcttgaaggcgaagtctttcgtttagcggggcatcccttcaatctcaactctcgcgaccaattggagaaagtgctctttgataaattaggtttaacccctgtcacgcgtacagagaagaccggcaaacgttccacttcggcagccgccttggaagcacttcgtggtgtgcacccgatcgtcgagttgattttgcagtatcgcgagctcagcaaactcaaatcaacctatcttgataggttacctcgtcttgttcatccacgtacgggtcgtttacacacccgcttcaatcaaacggcaacagccaccgggcgcttgtcgtcgagtgacccgaacctccagaatattccagtgcgcacgccgctgggccagcacattcgtaaagcgtttgttgcggaagaaggttggttattacttgcggccgattactcccagatcgaacttcgtgtattggcgcatctctctggcgacgagaatcttaaacgcgtgtttcgcgaaggcaaggatattcacactgaaaccgcagcctggatgttcggggtggactcggccttagtggaccccaagatgcgtcgtgccgccaagaccgtcaactttggcgtactctatggtatgtcagcagcacgtcttagtcaggaattgggcattgactacaaagaagctgaagcgtttatcgagcgctatttccaatcctttccgaaagttcgcgcgtggattgaacgtacgctcgaagaaggtcgcactcgcggctatgtggaaacgttattcgggcgtcgtcgctacgttccagatcttacgtctcgtgtccgctcagtgcgcgaagctgctgagcgtatggcctggaatatgcctgttcagggaacagcggcggacctcatgaagatcgccatggtgaaattgtttccgcgcttgaaacccttaggagcccaccttcttctgcaggtgcatgatgaactggtcttggaagtacccgaggatcgcgcagaagaagccaaagcactcgtgaaagaggttatggaaaacgcgtatccgttagatgttccgttggaggtcgaagtgggtgtaggccgtgattggcttgaagcgaaacaagactaatga

SEQ ID NO: 1354 - protein, 844 aa, synthetic construct
  REGION 1..844: note = DNA Polymerase Variant
MHHHHHHGGSGMLPLFDLEEPPKRVLLVDGHHLAYRTFYALSLTTSRGEPVQMVYGFARSLLKALKEDGQAVVVVFDAKAPSFRHEAYEAYKAGRAPTPEDFPRQLALVKRLVDLLGLVRLEAPGYEADDVLGTLAKKAEREGMEVHILTGDRDFFQLLSEKVSVLLPDGTLVTPKDVQEKYGVPPERWVDFRALTGDRSDNIPGVAGIGEKTALRLLAEWGSVENLLKNLDRVKPDSLRRKIEAHLEDLILSLDLVRIRTDLPLEVDFKALRRRTPDLEGLRAFLEELELGSLLHEFGLLGGEKPREEAPWPPPEGAFVGFLLSRKEPMWAELLALAAAAEGRVHRATSPVEALADLKEARGFLAKDLVVLALREGVALDPTDDPLLVAYLLDSANTNPERVARRYGGEFTEDAAERALLSERLFQTLFPRLSEKLLWLYQEVERPLSRVLAHMEARGVRLDVPLLEALSFEAAKELERLEGEVFRLAGHPFNLNSRDQLEKVLFDKLGLTPVTRTEKTGKRSTSAAALEALRGVHPIVELILQYRELSKLKSTYLDRLPRLVHPRTGRLHTRFNQTATATGRLSSSDPNLQNIPVRTPLGQHIRKAFVAEEGWLLLAADYSQIELRVLAHLSGDENLKRVFREGKDIHTETAAWMFGVDSALVDPKMRRAAKTVNFGVLYGMSAARLSQELGIDYKEAEAFIERYFQSFPKVRAWIERTLEEGRTRGYVETLFGRRRYVPDLTSRVRSVREAAERMAWNMPVQGTAADLMKIAMVKLFPRLKPLGAHLLLQVHDELVLEVPEDRAEEAKALVKEVMENAYPLDVPLEVEVGVGRDWLEAKQD

SEQ ID NO: 1355 - DNA, 2538 bp, synthetic construct
  misc_feature 1..2538: note = DNA Polymerase Variant
  source 1..2538: mol_type = other DNA
atgcaccatcatcatcatcatggcggtagcggcatgttaccgctgtttgatttggaagaaccaccaaaacgcgtgctgcttgttgacggccatcatctggcgtatcgtaccttctacgcactgagccttacgacctcacgtggtgagcctgtccagatggtgtatgggtttgctcgctccctgctgaaagccctgaaggaagatggtcaagccgtagtagtggttttcgataacaaggcaccgtcgtttcgtcacgaagcgtacgaggcctataaagctggccgcgcaccgaccccggaagactttccgcgtcagttagcgctcgtcaaacgcctcgtggatttgctgggattagttcgcttggaagctcctggctacgaggcggacgacgtgctcggtacactggccaagaaagcagaacgtgaaggcatggaggtccatattcttaccggtgatcgcgatttcttccagctgctgtctgagaaagtgagcgttttgctgcccgatggcacgttagtaaccccgaaagatgtgcaagagaaatatggagttccgccagaacgttgggtggactttcgcgcactgactggtgatcgttcagacaacatcccgggcgttgccgggattggtgaaaagacggcgctgcgcctgctggcagaatggggctcggtggaaaatctgctcaagaaccttgatcgtgtgaaacctgatagcttacgccgcaagatcgaagcccacctggaagacttgcgcctgagtctggatcttgtacgtattcgcaccgatctgccgttggaagtagactttaaagctctgcgtcgtcgcacacccgatttagaggggttacgcgcgttcctcgaagaactggagctgggctccctgctgcatgaattcggtttgttgggcggagagaaaccgcgtgaagaagcaccatggccgccgcccgagggtgcctttgtcggctttcttctgtcacgcaaagagccaatgtgggcggaactgttagctcttgcagccgccgcggaagggcgtgttcaccgcgcgacctctcctgtcgaggccctcgctgacctcaaagaagcacgtggtttcttggcgaaagatttagccgtgcttgcattacgcgaaggcgttgcgctcgatccgacggacgacccgcttttggtggcttatttgctcgatagcgcgaataccaacccggaacgtgtcgcccgtcgttacggcggcgagtttactgaagatgcggcagaacgcgcgttgcttagcgaacgcctcttccagacgttatttccacgtctttcggagaaattactctggctctatcaggaagtcgaacgtccattgagtcgcgtgcttgcccatatggaggctcgcggtgtgcgcttagatgttccgttgttagaagcactcagcttcgaggcggcaaaagaactggaacgtcttgaaggcgaagtctttcgtttagcggggcatcccttcaatctcaactctcgcgaccaattggagaaagtgctctttgataaattaggtttaacccctgtcacgcgtacagagaagaccggcaaacgttccacttcggcagccgccttggaagcacttcgtggtgtgcacccgatcgtcgagttgattttgcagtatcgcgagctcagcaaactcaaatcaacctatcttgataggttacctcgtcttgttcatccacgtacgggtcgtttacacacccgcttcaatcaaacggcaacagccaccgggcgcttgtcgtcgagtgacccgaacctccagaatattccagtgcgcacgccgctgggccagcacattcgtaaagcgtttgttgcggaagaaggttggttattacttgcggccgattactcccagatcgaacttcgtgtattggcgcatctctctggcgacgagaatcttaaacgcgtgtttcgcgaaggcaaggatattcacactgaaaccgcagcctggatgttcggggtggactcggccttagtggaccccaagatgcgtcgtgccgccaagaccgtcaactttggcgtactctatggtatgtcagcagcacgtcttagtcaggaattgggcattgactacaaagaagctgaagcgtttatcgagcgctatttccaatcctttccgaaagttcgcgcgtggattgaacgtacgctcgaagaaggtcgcactcgcggctatgtggaaacgttattcgggcgtcgtcgctacgttccagatcttacgtctcgtgtccgctcagtgcgcgaagctgctgagcgtatggcctggaatatgcctgttcagggaacagcggcggacctcatgaagatcgccatggtgaaattgtttccgcgcttgaaacccttaggagcccaccttcttctgcaggtgcatgatgaactggtcttggaagtacccgaggatcgcgcagaagaagccaaagcactcgtgaaagaggttatggaaaacgcgtatccgttagatgttccgttggaggtcgaagtgggtgtaggccgtgattggcttgaagcgaaacaagactaatga

SEQ ID NO: 1356 - protein, 844 aa, synthetic construct
  REGION 1..844: note = DNA Polymerase Variant
MHHHHHHGGSGMLPLFDLEEPPKRVLLVDGHHLAYRTFYALSLTTSRGEPVQMVYGFARSLLKALKEDGQAVVVVFDNKAPSFRHEAYEAYKAGRAPTPEDFPRQLALVKRLVDLLGLVRLEAPGYEADDVLGTLAKKAEREGMEVHILTGDRDFFQLLSEKVSVLLPDGTLVTPKDVQEKYGVPPERWVDFRALTGDRSDNIPGVAGIGEKTALRLLAEWGSVENLLKNLDRVKPDSLRRKIEAHLEDLRLSLDLVRIRTDLPLEVDFKALRRRTPDLEGLRAFLEELELGSLLHEFGLLGGEKPREEAPWPPPEGAFVGFLLSRKEPMWAELLALAAAAEGRVHRATSPVEALADLKEARGFLAKDLAVLALREGVALDPTDDPLLVAYLLDSANTNPERVARRYGGEFTEDAAERALLSERLFQTLFPRLSEKLLWLYQEVERPLSRVLAHMEARGVRLDVPLLEALSFEAAKELERLEGEVFRLAGHPFNLNSRDQLEKVLFDKLGLTPVTRTEKTGKRSTSAAALEALRGVHPIVELILQYRELSKLKSTYLDRLPRLVHPRTGRLHTRFNQTATATGRLSSSDPNLQNIPVRTPLGQHIRKAFVAEEGWLLLAADYSQIELRVLAHLSGDENLKRVFREGKDIHTETAAWMFGVDSALVDPKMRRAAKTVNFGVLYGMSAARLSQELGIDYKEAEAFIERYFQSFPKVRAWIERTLEEGRTRGYVETLFGRRRYVPDLTSRVRSVREAAERMAWNMPVQGTAADLMKIAMVKLFPRLKPLGAHLLLQVHDELVLEVPEDRAEEAKALVKEVMENAYPLDVPLEVEVGVGRDWLEAKQD

SEQ ID NO: 1357 - DNA, 2538 bp, synthetic construct
  misc_feature 1..2538: note = DNA Polymerase Variant
  source 1..2538: mol_type = other DNA
atgcaccatcatcatcatcatggcggtagcggcatgttaccgctgtttgatttggaagaaccaccaaaacgcgtgctgcttgttgacggccatcatctggcgtatcgtaccttctacgcactgagccttacgacctcacgtggtgagcctgtccagatggtgtatgggtttgctcgctccctgctgaaagccctgaaggaagatggtcaagccgtagtagtggttttcgataacaaggcaccgtcgtttcgtcacgaagcgtacgaggcctataaagctggccgcgcaccgaccccggaagactttccgcgtcagttagcgctcgtcaaacgcctcgtggatttgctgggattagttcgcttggaagctcctggctacgaggcggacgacgtgctcggtacactggccaagaaagcagaacgtgaaggcatggaggtccatattcttaccggtgatcgcgatttcttccagctgctgtctgagaaagtgagcgttttgctgcccgatggcacgttagtaaccccgaaagatgtgcaagagaaatatggagttccgccagaacgttgggtggactttcgcgcactgactggtgatcgttcagacaacatcccgggcgttgccgggattggtgaaaagacggcgctgcgcctgctggcagaatggggctcggtggaaaatctgctcaagaaccttgatcgtgtgaaacctgatagcttacgccgcaagatcgaagcccacctggaagacttgcgcctgagtctggatcttgtacgtattcgcaccgatctgccgttggaagtagactttaaagctctgcgtcgtcgcacacccgatttagaggggttacgcgcgttcctcgaagaactggagctgggctccctgctgcatgaattcggtttgttgggcggagagaaaccgcgtgaagaagcaccatggccgccgcccgagggtgcctttgtcggctttcttctgtcacgcaaagagccaatgtgggcggaactgttagctcttgcagccgccgcggaagggcgtgttcaccgcgcgacctctcctgtcgaggccctcgctgacctcaaagaagcacgtggtttcttggcgaaagatttagtcgtgcttgcattacgcgaaggcgttgcgctcgatccgacggacgacccgcttttggtggcttatttgctcgatagcgcgaataccaacccggaacgtgtcgcccgtcgttacggcggcgagtttactgaagatgcggcagaacgcgcgttgcttagcgaacgcctcttccagacgttatttccacgtctttcggagaaattactctggctctatcaggaagtcgaacgtccattgagtcgcgtgcttgcccatatggaggctcgcggtgtgcgcttagatgttccgttgttagaagcactcagcttcgaggcggcaaaagaactggaacgtcttgaaggcgaagtctttcgtttagcggggcatcccttcaatctcaactctcgcgaccaattggagaaagtgctctttgatgaattaggtttaacccctgtcacgcgtacagagaagaccggcaaacgttccacttcggcagccgccttggaagcacttcgtggtgtgcacccgatcgtcgagttgattttgcagtatcgcgagctcagcaaactcaaatcaacctatcttgataggttacctcgtcttgttcatccacgtacgggtcgtttacacacccgcttcaatcaaacggcaacagccaccgggcgcttgtcgtcgagtgacccgaacctccagaatattccagtgcgcacgccgctgggccagcacattcgtaaagcgtttgttgcggaagaaggttggttattacttgcggccgattactcccagatcgaacttcgtgtattggcgcatctctctggcgacgagaatcttaaacgcgtgtttcgcgaaggcaaggatattcacactgaaaccgcagcctggatgttcggggtggactcggccttagtggaccccaagatgcgtcgtgccgccaagaccgtcaactttggcgtactctatggtatgtcagcagcacgtcttagtcaggaattgggcattgacctgaaagaagctgaagcgtttatcgagcgctatttccaatcctttccgaaagttcgcgcgtggattgaacgtacgctcgaagaaggtcgcactcgcggctatgtggaaacgttattcgggcgtcgtcgctacgttccagatcttacgtctcgtgtccgctcagtgcgcgaagctgctgagcgtatggcctggaatatgcctgttcagggaacagcggcggacctcatgaagatcgccatggtgaaattgtttccgcgcttgaaacccttaggagcccaccttcttctgcaggtgcatgatgaaattgtcttggaagtacccgaggatcgcgcagaagaagccaaagcactcgtgaaagaggttatggaaaacgcgtatccgttagatgttccgttggaggtcgaagtgggtgtaggccgtgattggcttgaagcgaaacaagactaatga

SEQ ID NO: 1358 - protein, 844 aa, synthetic construct
  REGION 1..844: note = DNA Polymerase Variant
MHHHHHHGGSGMLPLFDLEEPPKRVLLVDGHHLAYRTFYALSLTTSRGEPVQMVYGFARSLLKALKEDGQAVVVVFDNKAPSFRHEAYEAYKAGRAPTPEDFPRQLALVKRLVDLLGLVRLEAPGYEADDVLGTLAKKAEREGMEVHILTGDRDFFQLLSEKVSVLLPDGTLVTPKDVQEKYGVPPERWVDFRALTGDRSDNIPGVAGIGEKTALRLLAEWGSVENLLKNLDRVKPDSLRRKIEAHLEDLRLSLDLVRIRTDLPLEVDFKALRRRTPDLEGLRAFLEELELGSLLHEFGLLGGEKPREEAPWPPPEGAFVGFLLSRKEPMWAELLALAAAAEGRVHRATSPVEALADLKEARGFLAKDLVVLALREGVALDPTDDPLLVAYLLDSANTNPERVARRYGGEFTEDAAERALLSERLFQTLFPRLSEKLLWLYQEVERPLSRVLAHMEARGVRLDVPLLEALSFEAAKELERLEGEVFRLAGHPFNLNSRDQLEKVLFDELGLTPVTRTEKTGKRSTSAAALEALRGVHPIVELILQYRELSKLKSTYLDRLPRLVHPRTGRLHTRFNQTATATGRLSSSDPNLQNIPVRTPLGQHIRKAFVAEEGWLLLAADYSQIELRVLAHLSGDENLKRVFREGKDIHTETAAWMFGVDSALVDPKMRRAAKTVNFGVLYGMSAARLSQELGIDLKEAEAFIERYFQSFPKVRAWIERTLEEGRTRGYVETLFGRRRYVPDLTSRVRSVREAAERMAWNMPVQGTAADLMKIAMVKLFPRLKPLGAHLLLQVHDEIVLEVPEDRAEEAKALVKEVMENAYPLDVPLEVEVGVGRDWLEAKQD

SEQ ID NO: 1359 - DNA, 2538 bp, synthetic construct
  misc_feature 1..2538: note = DNA Polymerase Variant
  source 1..2538: mol_type = other DNA
atgcaccatcatcatcatcatggcggtagcggcatgttaccgctgtttgatttggaagaaccaccaaaacgcgtgctgcttgttgacggccatcatctggcgtatcgtaccttctacgcactgagccttacgacctcacgtggtgagcctacgcagatggtgtatgggtttgctcgctccctgctgaaagccctgaaggaagatggtcaagccgtagtagtggttttcgatgcgaaggcaccgtcgtttcgtcacgaagcgtacgaggcctataaagctggccgcgcaccgaccccggaagactttccgcgtcagttagcgctcgtcaaacgcctcgtggatttgctgggattagttcgcttggaagctcctggctacgaggcggacgacgtgctcggtacactggccaagaaagcagaacgtgaaggcatggaggtccatattcttaccggtgatcgcgatttcttccagctgctgtctgagaaagtgagcgttttgctgcccgatggcacgttagtaaccccgaaagatgtgcaagagaaatatggagttccgccagaacgttgggtggactttcgcgcactgactggtgatcgttcagacaacatcccgggcgttgccgggattggtgaaaagacggcgctgcgcctgctggcagaatggggctcggtggaaaatctgctcaagaaccttgatcgtgtgaaacctgatagcttacgccgcaagatcgaagcccacctggaagacttgattctgagtctggatcttgtacgtattcgcaccgatctgccgttggaagtagactttaaagctctgcgtcgtcgcacacccgatttagaggggttacgcgcgttcctcgaagaactggagctgggctccctgctgcatgaattcggtttgttgggcggagagaaaccgcgtgaagaagcaccatggccgccgcccgagggtgcctttgtcggctttcttctgtcacgcaaagagccaatgtgggcggaactgttagctcttgcagccgccgcggaagggcgtgttcaccgcgcgacctctcctgtcgaggccctcgctgacctcaaagaagcacgtggtttcttggcgaaagatttagccgtgcttgcattacgcgaaggcgttgcgctcgatccgacggacgacccgcttttggtggcttatttgctcgatagcgcgaataccaacccggaacgtgtcgcccgtcgttacggcggcgagtttactgaagatgcggcagaacgcgcgttgcttagcgaacgcctcttccagacgttatttccacgtctttcggagaaattactctggctctatcaggaagtcgaacgtccattgagtcgcgtgcttgcccatatggaggctcgcggtgtgcgcttagatgttccgttgttagaagcactcagcttcgaggcggcaaaagaactggaacgtcttgaaggcgaagtctttcgtttagcggggcatcccttcaatctcaactctcgcgaccaattggagaaagtgctctttgatgaattaggtttaacccctgtcacgcgtacagagaagaccggcaaacgttccacttcggcagccgccttggaagcacttcgtggtgtgcacccgatcgtcgagttgattttgcagtatcgcgagctcagcaaactcaaatcaacctatcttgataggttacctcgtcttgttcatccacgtacgggtcgtttacacacccgcttcaatcaaacggcaacagccaccgggcgcttgtcgtcgagtgacccgaacctccagaatattccagtgcgcacgccgctgggccaacacattcgtaaagcgtttgttgcggaagaaggttggttattacttgcggccgattactcccagatcgaacttcgtgtattggcgcatctctctggcgacgagaatcttaaacgcgtgtttcgcgaaggcaaggatattcacactgaaaccgcagcctggatgttcggggtggactcggccttagtggaccccaagatgcgtcgtgccgccaagaccgtcaactttggcgtactctatggtatgtcagcagcacgtcttagtcaggaattgggcattgactacaaagaagctgaagcgtttatcgagcgctatttccaatcctttccgaaagttcgcgcgtggattgaacgtacgctcgaagaaggtcgcactcgcggctatgtggaaacgttattcgggcgtcgtcgctacgttccagatcttacgtctcgtgtccgctcagtgcgcgaagctgctgagcgtatggcctggaatatgcctgttcagggaacagcggcggacctcatgaagatcgccatggtgaaattgtttccgcgcttgaaacccttaggagcccaccttcttctgcaggtgcatgatgaactggtcttggaagtacccgaggatcgcgcagaagaagccaaagcactcgtgaaagaggttatggaaaacgcgtatccgttagatgttccgttggaggtcgaagtgggtgtaggccgtgattggcttgaagcgaaacaagactaatga

SEQ ID NO: 1360 - protein, 844 aa, synthetic construct
  REGION 1..844: note = DNA Polymerase Variant
MHHHHHHGGSGMLPLFDLEEPPKRVLLVDGHHLAYRTFYALSLTTSRGEPTQMVYGFARSLLKALKEDGQAVVVVFDAKAPSFRHEAYEAYKAGRAPTPEDFPRQLALVKRLVDLLGLVRLEAPGYEADDVLGTLAKKAEREGMEVHILTGDRDFFQLLSEKVSVLLPDGTLVTPKDVQEKYGVPPERWVDFRALTGDRSDNIPGVAGIGEKTALRLLAEWGSVENLLKNLDRVKPDSLRRKIEAHLEDLILSLDLVRIRTDLPLEVDFKALRRRTPDLEGLRAFLEELELGSLLHEFGLLGGEKPREEAPWPPPEGAFVGFLLSRKEPMWAELLALAAAAEGRVHRATSPVEALADLKEARGFLAKDLAVLALREGVALDPTDDPLLVAYLLDSANTNPERVARRYGGEFTEDAAERALLSERLFQTLFPRLSEKLLWLYQEVERPLSRVLAHMEARGVRLDVPLLEALSFEAAKELERLEGEVFRLAGHPFNLNSRDQLEKVLFDELGLTPVTRTEKTGKRSTSAAALEALRGVHPIVELILQYRELSKLKSTYLDRLPRLVHPRTGRLHTRFNQTATATGRLSSSDPNLQNIPVRTPLGQHIRKAFVAEEGWLLLAADYSQIELRVLAHLSGDENLKRVFREGKDIHTETAAWMFGVDSALVDPKMRRAAKTVNFGVLYGMSAARLSQELGIDYKEAEAFIERYFQSFPKVRAWIERTLEEGRTRGYVETLFGRRRYVPDLTSRVRSVREAAERMAWNMPVQGTAADLMKIAMVKLFPRLKPLGAHLLLQVHDELVLEVPEDRAEEAKALVKEVMENAYPLDVPLEVEVGVGRDWLEAKQD

SEQ ID NO: 1361 - DNA, 2538 bp, synthetic construct
  misc_feature 1..2538: note = DNA Polymerase Variant
  source 1..2538: mol_type = other DNA
atgcaccatcatcatcatcatggcggtagcggcatgttaccgctgtttgatttggaagaaccaccaaaacgcgtgctgcttgttgacggccatcatctggcgtatcgtaccttctacgcactgagccttacgacctcacgtggtgagcctgtccagatggtgtatgggtttgctcgctccctgctgaaagccctgaaggaaggcggtcaagccgtagtagtggttttcgatgcgaaggcaccgtcgtttcgtcacgaagcgtacgaggcctataaagctggccgcgcaccgaccccggaagactttccgcgtcagttagcgctcgtcaaacgcctcgtggatttgctgggattagttcgcttggaagctcctggctacgaggcggacgacgtgctcggtacactggccaagaaagcagaacgtgaaggcatggaggtccatattcttaccggtgatcgcgatttcttccagctgctgtctgagaaagtgagcgttttgctgcccgatggcacgttagtaaccccgaaagatgtgcaagagaaatatggagttccgccagaacgttgggtggactttcgcgcactgactggtgatcgttcagacaacatcccgggcgttgccgggattggtgaaaagacggcgctgcgcctgctggcagaatggggctcggtggaaaatctgctcaagaaccttgatcgtgtgaaacctgatagcttacgccgcaagatcgaagcccacctggaagacttgcgcctgagtctggatcttgtacgtattcgcaccgatctgccgttggaagtagactttaaagctctgcgtcgtcgcacacccgatttagaggggttacgcgcgttcctcgaagaactggagctgggctccctgctgcatgaattcggtttgttgggcggagagaaaccgcgtgaagaagcaccatggccgccgcccgagggtgcctttgtcggctttcttctgtcacgcaaagagccaatgtgggcggaactgttagctcttgcagccgccgcggaagggcgtgttcaccgcgcgacctctcctgtcgaggccctcgctgacctcaaagaagcacgtggtttcttggcgaaagatttagtcgtgcttgcattacgcgaaggcgttgcgctcgatccgacggacgacccgcttttggtggcttatttgctcgatagcgcgaataccaacccggaacgtgtcgcccgtcgttacggcggcgagtttacggaagatgcggcagaacgcgcgttgcttagcgaacgcctcttccagacgttatttccacgtctttcggagaaattactctggctctatcaggaagtcgaacgtccattgagtcgcgtgcttgcccatatggaggctcgcggtgtgcgcttagatgttccgttgttagaagcactcagcttcgaggcggcaaaagaactggaacgtcttgaaggcgaagtctttcgtttagcggggcatcccttcaatctcaactctcgcgaccaattggagaaagtgctctttgataaattaggtttaacccctgtcacgcgtacagagaagaccggcaaacgttccacttcggcagccgccttggaagcacttcgtggtgtgcacccgatcgtcgagttgattttgcagtatcgcgagctcagcaaactcaaatcaacctatcttgataggttacctcgtcttgttcatccacgtacgggtcgtttacacacccgcttcaatcaaacggcaacagccaccgggcgcttgtcgtcgagtgacccgaacctccagaatattccagtgcgcacgccgctgggcatgcacattcgtaaagcgtttgttgcggaagaaggttggttattacttgcggccgattactcccagatcgaacttcgtgtattggcgcatctctctggcgacgagaatcttaaacgcgtgtttcgcgaaggcaaggatattcacactgaaaccgcagcctggatgttcggggtggactcggccttagtggaccccaagatgcgtcgtgccgccaagaccgtcaactttggcgtactctatggtatgtcagcagcacgtcttagtcaggaattgggcattgacctgaaagaagctgaagcgtttatcgagcgctatttccaatcctttccgaaagttcgcgcgtggattgaacgtacgctcgaagaaggtcgcactcgcggctatgtggaaacgttattcgggcgtcgtcgctacgttccagatcttacgtctcgtgtccgctcagtgcgcgaagctgctgagcgtatggcctggaatatgcctgttcagggaacagcggcggacctcatgaagatcgccatggtgaaattgtttccgcgcttgaaacccttaggagcccaccttcttctgcaggtgcatgatgaactggtcttggaagtacccgaggatcgcgcagaagaagccaaagcactcgtgaaagaggttatggaaaacgcgtatccgttagatgttccgttggaggtcgaagtgggtgtaggccgtgattggcttgaagcgaaacaagactaatga

SEQ ID NO: 1362 - protein, 844 aa, synthetic construct
  REGION 1..844: note = DNA Polymerase Variant
MHHHHHHGGSGMLPLFDLEEPPKRVLLVDGHHLAYRTFYALSLTTSRGEPVQMVYGFARSLLKALKEGGQAVVVVFDAKAPSFRHEAYEAYKAGRAPTPEDFPRQLALVKRLVDLLGLVRLEAPGYEADDVLGTLAKKAEREGMEVHILTGDRDFFQLLSEKVSVLLPDGTLVTPKDVQEKYGVPPERWVDFRALTGDRSDNIPGVAGIGEKTALRLLAEWGSVENLLKNLDRVKPDSLRRKIEAHLEDLRLSLDLVRIRTDLPLEVDFKALRRRTPDLEGLRAFLEELELGSLLHEFGLLGGEKPREEAPWPPPEGAFVGFLLSRKEPMWAELLALAAAAEGRVHRATSPVEALADLKEARGFLAKDLVVLALREGVALDPTDDPLLVAYLLDSANTNPERVARRYGGEFTEDAAERALLSERLFQTLFPRLSEKLLWLYQEVERPLSRVLAHMEARGVRLDVPLLEALSFEAAKELERLEGEVFRLAGHPFNLNSRDQLEKVLFDKLGLTPVTRTEKTGKRSTSAAALEALRGVHPIVELILQYRELSKLKSTYLDRLPRLVHPRTGRLHTRFNQTATATGRLSSSDPNLQNIPVRTPLGMHIRKAFVAEEGWLLLAADYSQIELRVLAHLSGDENLKRVFREGKDIHTETAAWMFGVDSALVDPKMRRAAKTVNFGVLYGMSAARLSQELGIDLKEAEAFIERYFQSFPKVRAWIERTLEEGRTRGYVETLFGRRRYVPDLTSRVRSVREAAERMAWNMPVQGTAADLMKIAMVKLFPRLKPLGAHLLLQVHDELVLEVPEDRAEEAKALVKEVMENAYPLDVPLEVEVGVGRDWLEAKQD

SEQ ID NO: 1363 - DNA, 2538 bp, synthetic construct
  misc_feature 1..2538: note = DNA Polymerase Variant
  source 1..2538: mol_type = other DNA
atgcaccatcatcatcatcatggcggtagcggcatgttaccgctgtttgatttggaagaaccaccaaaacgcgtgctgcttgttgacggccatcatctggcgtatcgtaccttctacgcactgagccttacgacctcacgtggtgagcctgtccagatggtgtatgggtttgctcgctccctgctgaaagccctgaaggaagacggtcaagccgtagtagtggttttcgataacaaggcaccgtcgtttcgtcacgaagcgtacgaggcctataaagctggccgcgcaccgaccccggaagactttccgcgtcagttagcgctcgtcaaacgcctcgtggatttgctgggattagttcgcttggaagctcctggctacgaggcggacgacgtgctcggtacactggccaagaaagcagaacgtgaaggcatggaggtccatattcttaccggtgatcgcgatttcttccagctgctgtctgagaaagtgagcgttttgctgcccgatggcacgttagtaaccccgaaagatgtgcaagagaaatatggagttccgccagaacgttgggtggactttcgcgcactgactggtgatcgttcagacaacatcccgggcgttgccgggattggtgaaaagacggcgctgcgcctgctggcagaatggggctcggtggaaaatctgctcaagaaccttgatcgtgtgaaacctgatagcttacgccgcaagatcgaagcccacctggaagacttgattctgagtctggatcttgtacgtattcgcaccgatctgccgttggaagtagactttaaagctctgcgtcgtcgcacacccgatttagaggggttacgcgcgttcctcgaagaactggagctgggctccctgctgcatgaattcggtttgttgggcggagagaaaccgcgtgaagaagcaccatggccgccgcccgagggtgcctttgtcggctttcttctgtcacgcaaagagccaatgtgggcggaactgttagctcttgcagccgccgcggaagggcgtgttcaccgcgcgacctctcctgtcgaggccctcgctgacctcaaagaagcacgtggtttcttggcgaaagatttagtcgtgcttgcattacgcgaaggcgttgcgctcgatccgacggacgacccgcttttggtggcttatttgctcgatagcgcgaataccaacccggaacgtgtcgcccgtcgttacggcggcgagtttacggaagatgcggcagaacgcgcgttgcttagcgaacgcctcttccagacgttatttccacgtctttcggagaaattactctggctctatcaggaagtcgaacgtccattgagtcgcgtgcttgcccatatggaggctcgcggtgtgcgcttagatgttccgttgttagaagcactcagcttcgaggcggcaaaagaactggaacgtcttgaaggcgaagtctttcgtttagcggggcatcccttcaatctcaactctcgcgaccaattggagaaagtgctctttgatgaattaggtttaacccctgtcacgcgtacagagaagaccggcaaacgttccacttcggcagccgccttggaagcacttcgtggtgtgcacccgatcgtcgagttgattttgcagtatcgcgagctcagcaaactcaaatcaacctatcttgataggttacctcgtcttgttcatccacgtacgggtcgtttacacacccgcttcaatcaaacggcaacagccaccgggcgcttgtcgtcgagtgacccgaacctccagaatattccagtgcgcacgccgctgggccagcacattcgtaaagcgtttgttgcggaagaaggttggttattacttgcggccgattactcccagatcgaacttcgtgtattggcgcatctctctggcgacgagaatcttaaacgcgtgtttcgcgaaggcaaggatattcacactgaaaccgcagcctggatgttcggggtggactcggccttagtggaccccaagatgcgtcgtgccgccaagaccgtcaactttggcgtactctatggtatgtcagcagcacgtcttagtcaggaattgggcattgacctgaaagaagctgaagcgtttatcgagcgctatttccaatcctttccgaaagttcgcgcgtggattgaacgtacgctcgaagaaggtcgcactcgcggctatgtggaaacgttattcgggcgtcgtcgctacgttccagatcttacgtctcgtgtccgctcagtgcgcgaagctgctgagcgtatggcctggaatatgcctgttcagggaacagcggcggacctcatgaagatcgccatggtgaaattgtttccgcgcttgaaacccttaggagcccaccttcttctgcaggtgcatgatgaaattgtcttggaagtacccgaggatcgcgcagaagaagccaaagcactcgtgaaagaggttatggaaaacgcgtatccgttagatgttccgttggaggtcgaagtgggtgtaggccgtgattggcttgaagcgaaacaagactaatga

SEQ ID NO: 1364 - protein, 844 aa, synthetic construct
  REGION 1..844: note = DNA Polymerase Variant
MHHHHHHGGSGMLPLFDLEEPPKRVLLVDGHHLAYRTFYALSLTTSRGEPVQMVYGFARSLLKALKEDGQAVVVVFDNKAPSFRHEAYEAYKAGRAPTPEDFPRQLALVKRLVDLLGLVRLEAPGYEADDVLGTLAKKAEREGMEVHILTGDRDFFQLLSEKVSVLLPDGTLVTPKDVQEKYGVPPERWVDFRALTGDRSDNIPGVAGIGEKTALRLLAEWGSVENLLKNLDRVKPDSLRRKIEAHLEDLILSLDLVRIRTDLPLEVDFKALRRRTPDLEGLRAFLEELELGSLLHEFGLLGGEKPREEAPWPPPEGAFVGFLLSRKEPMWAELLALAAAAEGRVHRATSPVEALADLKEARGFLAKDLVVLALREGVALDPTDDPLLVAYLLDSANTNPERVARRYGGEFTEDAAERALLSERLFQTLFPRLSEKLLWLYQEVERPLSRVLAHMEARGVRLDVPLLEALSFEAAKELERLEGEVFRLAGHPFNLNSRDQLEKVLFDELGLTPVTRTEKTGKRSTSAAALEALRGVHPIVELILQYRELSKLKSTYLDRLPRLVHPRTGRLHTRFNQTATATGRLSSSDPNLQNIPVRTPLGQHIRKAFVAEEGWLLLAADYSQIELRVLAHLSGDENLKRVFREGKDIHTETAAWMFGVDSALVDPKMRRAAKTVNFGVLYGMSAARLSQELGIDLKEAEAFIERYFQSFPKVRAWIERTLEEGRTRGYVETLFGRRRYVPDLTSRVRSVREAAERMAWNMPVQGTAADLMKIAMVKLFPRLKPLGAHLLLQVHDEIVLEVPEDRAEEAKALVKEVMENAYPLDVPLEVEVGVGRDWLEAKQD

SEQ ID NO: 1365 - DNA, 2538 bp, synthetic construct
  misc_feature 1..2538: note = DNA Polymerase Variant
  source 1..2538: mol_type = other DNA
atgcaccatcatcatcatcatggcggtagcggcatgttaccgctgtttgatttggaagaaccaccaaaacgcgtgctgcttgttgacggccatcatctggcgtatcgtaccttctacgcactgagccttacgacctcacgtggtgagcctgtccagatggtgtatgggtttgctcgctccctgctgaaagccctgaaggaagatggtcaagccgtagtagtggttttcgataacaaggcaccgtcgtttcgtcacgaagcgtacgaggcctataaagctggccgcgcaccgaccccggaagactttccgcgtcagttagcgctcgtcaaacgcctcgtggatttgctgggattagttcgcttggaagctcctggctacgaggcggacgacgtgctcggtacactggccaagaaagcagaacgtgaaggcatggaggtccatattcttaccggtgatcgcgatttcttccagctgctgtctgagaaagtgagcgttttgctgcccgatggcacgttagtaaccccgaaagatgtgcaagagaaatatggagttccgccagaacgttgggtggactttcgcgcactgactggtgatcgttcagacaacatcccgggcgttgccgggattggtgaaaagacggcgctgcgcctgctggcagaatggggctcggtggaaaatctgctcaagaaccttgatcgtgtgaaacctgatagcttacgccgcaagatcgaagcccacctggaagacttgcgtctgagtctggatcttgtacgtattcgcaccgatctgccgttggaagtagactttaaagctctgcgtcgtcgcacacccgatttagaggggttacgcgcgttcctcgaagaactggagctgggctccctgctgcatgaattcggtttgttgggcggagagaaaccgcgtgaagaagcaccatggccgccgcccgagggtgcctttgtcggctttcttctgtcacgcaaagagccaatgtgggcggaactgttagctcttgcagccgccgcggaagggcgtgttcaccgcgcgacctctcctgtcgaggccctcgctgacctcaaagaagcacgtggtttcttggcgaaagatttagccgtgcttgcattacgcgaaggcgttgcgctcgatccgacggacgacccgcttttggtggcttatttgctcgatagcgcgaataccaacccggaacgtgtcgcccgtcgttacggcggcgagtttactgaagatgcggcagaacgcgcgttgcttagcgaacgcctcttccagacgttatttccacgtctttcggagaaattactctggctctatcaggaagtcgaacgtccattgagtcgcgtgcttgcccatatggaggctcgcggtgtgcgcttagatgttccgttgttagaagcactcagcttcgaggcggcaaaagaactggaacgtcttgaaggcgaagtctttcgtttagcggggcatcccttcaatctcaactctcgcgaccaattggagaaagtgctctttgatgaattaggtttaacccctgtcacgcgtacagagaagaccggcaaacgttccacttcggcagccgccttggaagcacttcgtggtgtgcacccgatcgtcgagttgattttgcagtatcgcgagctcagcaaactcaaatcaacctatcttgataggttacctcgtcttgttcatccacgtacgggtcgtttacacacccgcttcaatcaaacggcaacagccaccgggcgcttgtcgtcgagtgacccgaacctccagaatattccagtgcgcacgccgctgggcatgcacattcgtaaagcgtttgttgcggaagaaggttggttattacttgcggccgattactcccagatcgaacttcgtgtattggcgcatctctctggcgacgagaatcttaaacgcgtgtttcgcgaaggcaaggatattcacactgaaaccgcagcctggatgttcggggtggactcggccttagtggaccccaagatgcgtcgtgccgccaagaccgtcaactttggcgtactctatggtatgtcagcagcacgtcttagtcaggaattgggcattgactacaaagaagctgaagcgtttatcgagcgctatttccaatcctttccgaaagttcgcgcgtggattgaacgtacgctcgaagaaggtcgcactcgcggctatgtggaaacgttattcgggcgtcgtcgctacgttccagatcttacgtctcgtgtccgctcagtgcgcgaagctgctgagcgtatggcctggaatatgcctgttcagggaacagcggcggacctcatgaagatcgccatggtgaaattgtttccgcgcttgaaacccttaggagcccaccttcttctgcaggtgcatgatgaaattgtcttggaagtacccgaggatcgcgcagaagaagccaaagcactcgtgaaagaggttatggaaaacgcgtatccgttagatgttccgttggaggtcggagtgggtgtaggccgtgattggcttgaagcgaaacaagactaatga

SEQ ID NO: 1366 - protein, 844 aa, synthetic construct
  REGION 1..844: note = DNA Polymerase Variant
MHHHHHHGGSGMLPLFDLEEPPKRVLLVDGHHLAYRTFYALSLTTSRGEPVQMVYGFARSLLKALKEDGQAVVVVFDNKAPSFRHEAYEAYKAGRAPTPEDFPRQLALVKRLVDLLGLVRLEAPGYEADDVLGTLAKKAEREGMEVHILTGDRDFFQLLSEKVSVLLPDGTLVTPKDVQEKYGVPPERWVDFRALTGDRSDNIPGVAGIGEKTALRLLAEWGSVENLLKNLDRVKPDSLRRKIEAHLEDLRLSLDLVRIRTDLPLEVDFKALRRRTPDLEGLRAFLEELELGSLLHEFGLLGGEKPREEAPWPPPEGAFVGFLLSRKEPMWAELLALAAAAEGRVHRATSPVEALADLKEARGFLAKDLAVLALREGVALDPTDDPLLVAYLLDSANTNPERVARRYGGEFTEDAAERALLSERLFQTLFPRLSEKLLWLYQEVERPLSRVLAHMEARGVRLDVPLLEALSFEAAKELERLEGEVFRLAGHPFNLNSRDQLEKVLFDELGLTPVTRTEKTGKRSTSAAALEALRGVHPIVELILQYRELSKLKSTYLDRLPRLVHPRTGRLHTRFNQTATATGRLSSSDPNLQNIPVRTPLGMHIRKAFVAEEGWLLLAADYSQIELRVLAHLSGDENLKRVFREGKDIHTETAAWMFGVDSALVDPKMRRAAKTVNFGVLYGMSAARLSQELGIDYKEAEAFIERYFQSFPKVRAWIERTLEEGRTRGYVETLFGRRRYVPDLTSRVRSVREAAERMAWNMPVQGTAADLMKIAMVKLFPRLKPLGAHLLLQVHDEIVLEVPEDRAEEAKALVKEVMENAYPLDVPLEVGVGVGRDWLEAKQD

SEQ ID NO: 1367 - DNA, 2538 bp, synthetic construct
  misc_feature 1..2538: note = DNA Polymerase Variant
  source 1..2538: mol_type = other DNA
atgcaccatcatcatcatcatggcggtagcggcatgttaccgctgtttgatttggaagaaccaccaaaacgcgtgctgcttgttgacggccatcatctggcgtatcgtaccttctacgcactgagccttacgacctcacgtggtgagcctgtccagatggtgtatgggtttgctcgctccctgctgaaagccctgaaggaagatggtcaagccgtagtagtggttttcgatgcgaaggcaccgtcgtttcgtcacgaagcgtacgaggcctataaagctggccgcgcaccgaccccggaagactttccgcgtcagttagcgctcgtcaaacgcctcgtggatttgctgggattagttcgcttggaagctcctggctacgaggcggacgacgtgctcggtacactggccaagaaagcagaacgtgaaggcatggaggtccatattcttaccggtgatcgcgatttcttccagctgctgtctgagaaagtgagcgttttgctgcccgatggcacgttagtaaccccgaaagatgtgcaagagaaatatggagttccgccagaacgttgggtggactttcgcgcactgactggtgatcgttcagacaacatcccgggcgttgccgggattggtgaaaagacggcgctgcgcctgctggcagaatggggctcggtggaaaatctgctcaagaaccttgatcgtgtgaaacctgatagcttacgccgcaagatcgaagcccacctggaagacttgcgcctgagtctggatcttgtacgtattcgcaccgatctgccgttggaagtagactttaaagctctgcgtcgtcgcacacccgatttagaggggttacgcgcgttcctcgaagaactggagctgggctccctgctgcatgaattcggtttgttgggcggagagaaaccgcgtgaagaagcaccatggccgccgcccgagggtgcctttgtcggctttcttctgtcacgcaaagagccaatgtgggcggaactgttagctcttgcagccgccgcggaagggcgtgttcaccgcgcgacctctcctgtcgaggccctcgctgacctcaaagaagcacgtggtttcttggcgaaagatttagtcgtgcttgcattacgcgaaggcgttgcgctcgatccgacggacgacccgcttttggtggcttatttgctcgatagcgcgaataccaacccggaacgtgtcgcccgtcgttacggcggcgagtttcgcgaagatgcggcagaacgcgcgttgcttagcgaacgcctcttccagacgttatttccacgtctttcggagaaattactctggctctatcaggaagtcgaacgtccattgagtcgcgtgcttgcccatatggaggctcgcggtgtgcgcttagatgttccgttgttagaagcactcagcttcgaggcggcaaaagaactggaacgtcttgaaggcgaagtctttcgtttagcggggcatcccttcaatctcaactctcgcgaccaattggagaaagtgctctttgataaattaggtttaacccctgtcacgcgtacagagaagaccggcaaacgttccacttcggcagccgccttggaagcacttcgtggtgtgcacccgatcgtcgagttgattttgcagtatcgcgagctcagcaaactcaaatcaacctatcttgataggttacctcgtcttgttcatccacgtacgggtcgtttacacacccgcttcaatcaaacggcaacagccaccgggcgcttgtcgtcgagtgacccgaacctccagaatattccagtgcgcacgccgctgggccagcacattcgtaaagcgtttgttgcggatgaaggttggttattacttgcggccgattactcccagatcgaacttcgtgtattggcgcatctctctggcgacgagaatcttaaacgcgtgtttcgcgaaggcaaggatattcacactgaaaccgcagcctggatgttcggggtggactcggccttagtggaccccaagatgcgtcgtgccgccaagaccgtcaactttggcgtactctatggtatgtcagcagcacgtcttagtcaggaattgggcattgactacaaagaagctgaagcgtttatcgagcgctatttccaatcctttccgaaagttcgcgcgtggattgaacgtacgctcgaagaaggtcgcactcgcggctatgtggaaacgttattcgggcgtcgtcgctacgttccagatcttacgtctcgtgtccgctcagtgcgcgaagctgctgagcgtatggcctggaatatgcctgttcagggaacagcggcggacctcatgaagatcgccatggtgaaattgtttccgcgcttgaaacccttaggagcccaccttcttctgcaggtgcatgatgaactggtcttggaagtacccgaggatcgcgcagaagaagccaaagcactcgtgaaagaggttatggaaaacgcgtatccgttagatgttccgttggaggtcgaagtgggtgtaggccgtgattggcttgaagcgaaacaagactaatga

SEQ ID NO: 1368 - protein, 844 aa, synthetic construct
  REGION 1..844: note = DNA Polymerase Variant
MHHHHHHGGSGMLPLFDLEEPPKRVLLVDGHHLAYRTFYALSLTTSRGEPVQMVYGFARSLLKALKEDGQAVVVVFDAKAPSFRHEAYEAYKAGRAPTPEDFPRQLALVKRLVDLLGLVRLEAPGYEADDVLGTLAKKAEREGMEVHILTGDRDFFQLLSEKVSVLLPDGTLVTPKDVQEKYGVPPERWVDFRALTGDRSDNIPGVAGIGEKTALRLLAEWGSVENLLKNLDRVKPDSLRRKIEAHLEDLRLSLDLVRIRTDLPLEVDFKALRRRTPDLEGLRAFLEELELGSLLHEFGLLGGEKPREEAPWPPPEGAFVGFLLSRKEPMWAELLALAAAAEGRVHRATSPVEALADLKEARGFLAKDLVVLALREGVALDPTDDPLLVAYLLDSANTNPERVARRYGGEFREDAAERALLSERLFQTLFPRLSEKLLWLYQEVERPLSRVLAHMEARGVRLDVPLLEALSFEAAKELERLEGEVFRLAGHPFNLNSRDQLEKVLFDKLGLTPVTRTEKTGKRSTSAAALEALRGVHPIVELILQYRELSKLKSTYLDRLPRLVHPRTGRLHTRFNQTATATGRLSSSDPNLQNIPVRTPLGQHIRKAFVADEGWLLLAADYSQIELRVLAHLSGDENLKRVFREGKDIHTETAAWMFGVDSALVDPKMRRAAKTVNFGVLYGMSAARLSQELGIDYKEAEAFIERYFQSFPKVRAWIERTLEEGRTRGYVETLFGRRRYVPDLTSRVRSVREAAERMAWNMPVQGTAADLMKIAMVKLFPRLKPLGAHLLLQVHDELVLEVPEDRAEEAKALVKEVMENAYPLDVPLEVEVGVGRDWLEAKQD

SEQ ID NO: 1369 - DNA, 2538 bp, synthetic construct
  misc_feature 1..2538: note = DNA Polymerase Variant
  source 1..2538: mol_type = other DNA
atgcaccatcatcatcatcatggcggtagcggcatgttaccgctgtttgatttggaagaaccaccaaaacgcgtgctgcttgttgacggccatcatctggcgtatcgtaccttctacgcactgagccttacgacctcacgtggtgagcctgtccagatggtgtatgggtttgctcgctccctgctgaaagccctgaaggaagacggtcaagccgcagtagtggttttcgatgcgaaggcaccgtcgtttcgtcacgaagcgtacgaggcctataaagctggccgcgcaccgaccccggaagactttccgcgtcagttagcgctcgtcaaacgcctcgtggatttgctgggattagttcgcttggaagctcctggctacgaggcggacgacgtgctcggtacactggccaagaaagcagaacgtgaaggcatggaggtccatattcttaccggtgatcgcgatttcttccagctgctgtctgagaaagtgagcgttttgctgcccgatggcacgttagtaaccccgaaagatgtgcaagagaaatatggagttccgccagaacgttgggtggactttcgcgcactgactggtgatcgttcagacaacatcccgggcgttgccgggattggtgaaaagacggcgctgcgcctgctggcagaatggggctcggtggaaaatctgctcaagaaccttgatcgtgtgaaacctgatagcttacgccgcaagatcgaagcccacctggaagacttgcgcctgagtctggatcttgtacgtattcgcaccgatctgccgttggaagtagactttaaagctctgcgtcgtcgcacacccgatttagaggggttacgcgcgttcctcgaagaactggagctgggctccctgctgcatgaattcggtttgttgggcggagagaaaccgcgtgaagaagcaccatggccgccgcccgagggtgcctttgtcggctttcttctgtcacgcaaagagccaatgtgggcggaactgttagctcttgcagccgccgcggaagggcgtgttcaccgcgcgacctctcctgtcgaggccctcgctgacctcaaagaagcacgtggtttcttggcgaaagatttagccgtgcttgcattacgcgaaggcgttgcgctcgatccgacggacgacccgcttttggtggcttatttgctcgatagcgcgaataccaacccggaacgtgtcgcccgtcgttacggcggcgagtttactgaagatgcggcagaacgcgcgttgcttagcgaacgcctcttccagacgttatttccacgtctttcggagaaattactctggctctatcaggaagtcgaacgtccattgagtcgcgtgcttgcccatatggaggctcgcggtgtgcgcttagatgttccgttgttagaagcactcagcttcgaggcggcaaaagaactggaacgtcttgaaggcgaagtctttcgtttagcggggcatcccttcaatctcaactctcgcgaccaattggagaaagtgctctttgataaattaggtttaacccctgtcacgcgtacagagaagaccggcaaacgttccacttcggcagccgccttggaagcacttcgtggtgtgcacccgatcgtcgagttgattttgcagtatcgcgagctcagcaaactcaaatcaacctatcttgataggttacctcgtcttgttcatccacgtacgggtcgtttacacacccgcttcaatcaaacggcaacagccaccgggcgcttgtcgtcgagtgacccgaacctccagaatattccagtgcgcacgccgctgggccagcacattcgtaaagcgtttgttgcggaagaaggttggttattacttgcggccgattactcccagatcgaacttcgtgtattggcgcatctctctggcgacgagaatcttaaacgcgtgtttcgcgaaggcaaggatattcacactgaaaccgcagcctggatgttcggggtggactcggccttagtggaccccaagatgcgtcgtgccgccaagaccgtcaactttggcgtactctatggtatgtcagcagcacgtcttagtcaggaattgggcattgactacaaagaagctgaagcgtttatcgagcgctatttccaatcctttccgaaagttcgcgcgtggattgaacgtacgctcgaagaaggtcgcactcgcggctatgtggaaacgttattcgggcgtcgtcgctacgttccagatcttacgtctcgtgtccgctcagtgcgcgaagctgctgagcgtatggcctggaatatgcctgttcagggaacagcggcggacctcatgaagatcgccatggtgaaattgtttccgcgcttgaaacccttaggagcccaccttcttctgcaggtgcatgatgaaattgtcttggaagtacccgaggatcgcgcagaagaagccaaagcactcgtgaaagaggttatggaaaacgcgtatccgttagatgttccgttggaggtcgaagtgggtgtaggccgtgattggcttgaagcgaaacaagactaatga

SEQ ID NO: 1370 - protein, 844 aa, synthetic construct
  REGION 1..844: note = DNA Polymerase Variant
MHHHHHHGGSGMLPLFDLEEPPKRVLLVDGHHLAYRTFYALSLTTSRGEPVQMVYGFARSLLKALKEDGQAAVVVFDAKAPSFRHEAYEAYKAGRAPTPEDFPRQLALVKRLVDLLGLVRLEAPGYEADDVLGTLAKKAEREGMEVHILTGDRDFFQLLSEKVSVLLPDGTLVTPKDVQEKYGVPPERWVDFRALTGDRSDNIPGVAGIGEKTALRLLAEWGSVENLLKNLDRVKPDSLRRKIEAHLEDLRLSLDLVRIRTDLPLEVDFKALRRRTPDLEGLRAFLEELELGSLLHEFGLLGGEKPREEAPWPPPEGAFVGFLLSRKEPMWAELLALAAAAEGRVHRATSPVEALADLKEARGFLAKDLAVLALREGVALDPTDDPLLVAYLLDSANTNPERVARRYGGEFTEDAAERALLSERLFQTLFPRLSEKLLWLYQEVERPLSRVLAHMEARGVRLDVPLLEALSFEAAKELERLEGEVFRLAGHPFNLNSRDQLEKVLFDKLGLTPVTRTEKTGKRSTSAAALEALRGVHPIVELILQYRELSKLKSTYLDRLPRLVHPRTGRLHTRFNQTATATGRLSSSDPNLQNIPVRTPLGQHIRKAFVAEEGWLLLAADYSQIELRVLAHLSGDENLKRVFREGKDIHTETAAWMFGVDSALVDPKMRRAAKTVNFGVLYGMSAARLSQELGIDYKEAEAFIERYFQSFPKVRAWIERTLEEGRTRGYVETLFGRRRYVPDLTSRVRSVREAAERMAWNMPVQGTAADLMKIAMVKLFPRLKPLGAHLLLQVHDEIVLEVPEDRAEEAKALVKEVMENAYPLDVPLEVEVGVGRDWLEAKQD

SEQ ID NO: 1371 - DNA, 2538 bp, synthetic construct
  misc_feature 1..2538: note = DNA Polymerase Variant
  source 1..2538: mol_type = other DNA
atgcaccatcatcatcatcatggcggtagcggcatgttaccgctgtttgatttggaagaaccaccaaaacgcgtgctgcttgttgacggccatcatctggcgtatcgtaccttctacgcactgagccttacgacctcacgtggtgagcctacgcagatggtgtatgggtttgctcgctccctgctgaaagccctgaaggaagatggtcaagccgtagtagtggttttcgatgcgaaggcaccgtcgtttcgtcacgaagcgtacgaggcctataaagctggccgcgcaccgaccccggaagactttccgcgtcagttagcgctcgtcaaacgcctcgtggatttgctgggattagttcgcttggaagctcctggctacgaggcggacgacgtgctcggtacactggccaagaaagcagaacgtgaaggcatggaggtccatattcttaccggtgatcgcgatttcttccagctgctgtctgagaaagtgagcgttttgctgcccgatggcacgttagtaaccccgaaagatgtgcaagagaaatatggagttccgccagaacgttgggtggactttcgcgcactgactggtgatcgttcagacaacatcccgggcgttgccgggattggtgaaaagacggcgctgcgcctgctggcagaatggggctcggtggaaaatctgctcaagaaccttgatcgtgtgaaacctgatagcttacgccgcaagatcgaagcccacctggaagacttgattctgagtctggatcttgtacgtattcgcaccgatctgccgttggaagtagactttaaagctctgcgtcgtcgcacacccgatttagaggggttacgcgcgttcctcgaagaactggagctgggctccctgctgcatgaattcggtttgttgggcggagagaaaccgcgtgaagaagcaccatggccgccgcccgagggtgcctttgtcggctttcttctgtcacgcaaagagccaatgtgggcggaactgttagctcttgcagccgccgcggaagggcgtgttcaccgcgcgacctctcctgtcgaggccctcgctgacctcaaagaagcacgtggtttcttggcgaaagatttagccgtgcttgcattacgcgaaggcgttgcgctcgatccgacggacgacccgcttttggtggcttatttgctcgatagcgcgaataccaacccggaacgtgtcgcccgtcgttacggcggcgagtttcgcgaagatgcggcagaacgcgcgttgcttagcgaacgcctcttccagacgttatttccacgtctttcggagaaattactctggctctatcaggaagtcgaacgtccattgagtcgcgtgcttgcccatatggaggctcgcggtgtgcgcttagatgttccgttgttagaagcactcagcttcgaggcggcaaaagaactggaacgtcttgaaggcgaagtctttcgtttagcggggcatcccttcaatctcaactctcgcgaccaattggagaaagtgctctttgatgaattaggtttaacccctgtcacgcgtacagagaagaccggcaaacgttccacttcggcagccgccttggaagcacttcgtggtgtgcacccgatcgtcgagttgattttgcagtatcgcgagctcagcaaactcaaatcaacctatcttgataggttacctcgtcttgttcatccacgtacgggtcgtttacacacccgcttcaatcaaacggcaacagccaccgggcgcttgtcgtcgagtgacccgaacctccagaatattccagtgcgcacgccgctgggccagcacattcgtaaagcgtttgttgcggaagaaggttggttattacttgcggccgattactcccagatcgaacttcgtgtattggcgcatctctctggcgacgagaatcttaaacgcgtgtttcgcgaaggcaaggatattcacactgaaaccgcagcctggatgttcggggtggactcggccttagtggaccccaagatgcgtcgtgccgccaagaccgtcaactttggcgtactctatggtatgtcagcagcacgtcttagtcaggaattgggcattgactacaaagaagctgaagcgtttatcgagcgctatttccaatcctttccgaaagttcgcgcgtggattgaacgtacgctcgaagaaggtcgcactcgcggctatgtggaaacgttattcgggcgtcgtcgctacgttccagatcttacgtctcgtgtccgctcagtgcgcgaagctgctgagcgtatggcctggaatatgcctgttcagggaacagcggcggacctcatgaagatcgccatggtgaaattgtttccgcgcttgaaacccttaggagcccaccttcttctgcaggtgcatgatgaaattgtcttggaagtacccgaggatcgcgcagaagaagccaaagcactcgtgaaagaggttatggaaaacgcgtatccgttagatgttccgttggaggtcgaagtgggtgtaggccgtgattggcttgaagcgaaacaagactaatga

SEQ ID NO: 1372 - protein, 844 aa, synthetic construct
  REGION 1..844: note = DNA Polymerase Variant
MHHHHHHGGSGMLPLFDLEEPPKRVLLVDGHHLAYRTFYALSLTTSRGEPTQMVYGFARSLLKALKEDGQAVVVVFDAKAPSFRHEAYEAYKAGRAPTPEDFPRQLALVKRLVDLLGLVRLEAPGYEADDVLGTLAKKAEREGMEVHILTGDRDFFQLLSEKVSVLLPDGTLVTPKDVQEKYGVPPERWVDFRALTGDRSDNIPGVAGIGEKTALRLLAEWGSVENLLKNLDRVKPDSLRRKIEAHLEDLILSLDLVRIRTDLPLEVDFKALRRRTPDLEGLRAFLEELELGSLLHEFGLLGGEKPREEAPWPPPEGAFVGFLLSRKEPMWAELLALAAAAEGRVHRATSPVEALADLKEARGFLAKDLAVLALREGVALDPTDDPLLVAYLLDSANTNPERVARRYGGEFREDAAERALLSERLFQTLFPRLSEKLLWLYQEVERPLSRVLAHMEARGVRLDVPLLEALSFEAAKELERLEGEVFRLAGHPFNLNSRDQLEKVLFDELGLTPVTRTEKTGKRSTSAAALEALRGVHPIVELILQYRELSKLKSTYLDRLPRLVHPRTGRLHTRFNQTATATGRLSSSDPNLQNIPVRTPLGQHIRKAFVAEEGWLLLAADYSQIELRVLAHLSGDENLKRVFREGKDIHTETAAWMFGVDSALVDPKMRRAAKTVNFGVLYGMSAARLSQELGIDYKEAEAFIERYFQSFPKVRAWIERTLEEGRTRGYVETLFGRRRYVPDLTSRVRSVREAAERMAWNMPVQGTAADLMKIAMVKLFPRLKPLGAHLLLQVHDEIVLEVPEDRAEEAKALVKEVMENAYPLDVPLEVEVGVGRDWLEAKQD

SEQ ID NO: 1373 - DNA, 2538 bp, synthetic construct
  misc_feature 1..2538: note = DNA Polymerase Variant
  source 1..2538: mol_type = other DNA
atgcaccatcatcatcatcatggcggtagcggcatgttaccgctgtttgatttggaagaaccaccaaaacgcgtgctgcttgttgacggccatcatctggcgtatcgtaccttctacgcactgagccttacgacctcacgtggtgagcctacgcagatggtgtatgggtttgctcgctccctgctgaaagccctgaaggaagatggtcaagccgtagtagtggttttcgatgcgaaggcaccgtcgtttcgtcacgaagcgtacgaggcctataaagctggccgcgcaccgaccccggaagactttccgcgtcagttagcgctcgtcaaacgcctcgtggatttgctgggattagttcgcttggaagctcctggctacgaggcggacgacgtgctcggtacactggccaagaaagcagaacgtgaaggcatggaggtccatattcttaccggtgatcgcgatttcttccagctgctgtctgagaaagtgagcgttttgctgcccgatggcacgttagtaaccccgaaagatgtgcaagagaaatatggagttccgccagaacgttgggtggactttcgcgcactgactggtgatcgttcagacaacatcccgggcgttgccgggattggtgaaaagacggcgctgcgcctgctggcagaatggggctcggtggaaaatctgctcaagaaccttgatcgtgtgaaacctgatagcttacgccgcaagatcgaagcccacctggaagacttgattctgagtctggatcttgtacgtattcgcaccgatctgccgttggaagtagactttaaagctctgcgtcgtcgcacacccgatttagaggggttacgcgcgttcctcgaagaactggagctgggctccctgctgcatgaattcggtttgttgggcggagagaaaccgcgtgaagaagcaccatggccgccgcccgagggtgcctttgtcggctttcttctgtcacgcaaagagccaatgtgggcggaactgttagctcttgcagccgccgcggaagggcgtgttcaccgcgcgacctctcctgtcgaggccctcgctgacctcaaagaagcacgtggtttcttggcgaaagatttagtcgtgcttgcattacgcgaaggcgttgcgctcgatccgacggacgacccgcttttggtggcttatttgctcgatagcgcgaataccaacccggaacgtgtcgcccgtcgttacggcggcgagtttacggaagatgcggcagaacgcgcgttgcttagcgaacgcctcttccagacgttatttccacgtctttcggagaaattactctggctctatcaggaagtcgaacgtccattgagtcgcgtgcttgcccatatggaggctcgcggtgtgcgcttagatgttccgttgttagaagcactcagcttcgaggcggcaaaagaactggaacgtcttgaaggcgaagtctttcgtttagcggggcatcccttcaatctcaactctcgcgaccaattggagaaagtgctctttgataaattaggtttaacccctgtcacgcgtacagagaagaccggcaaacgttccacttcggcagccgccttggaagcacttcgtggtgtgcacccgatcgtcgagttgattttgcagtatcgcgagctcagcaaactcaaatcaacctatcttgataggttacctcgtcttgttcatccacgtacgggtcgtttacacacccgcttcaatcaaacggcaacagccaccgggcgcttgtcgtcgagtgacccgaacctccagaatattccagtgcgcacgccgctgggcatgcacattcgtaaagcgtttgttgcggaagaaggttggttattacttgcggccgattactcccagatcgaacttcgtgtattggcgcatctctctggcgacgagaatcttaaacgcgtgtttcgcgaaggcaaggatattcacactgaaaccgcagcctggatgttcggggtggactcggccttagtggaccccaagatgcgtcgtgccgccaagaccgtcaactttggcgtactctatggtatgtcagcagcacgtcttagtcaggaattgggcattgactacaaagaagctgaagcgtttatcgagcgctatttccaatcctttccgaaagttcgcgcgtggattgaacgtacgctcgaagaaggtcgcactcgcggctatgtggaaacgttattcgggcgtcgtcgctacgttccagatcttacgtctcgtgtccgctcagtgcgcgaagctgctgagcgtatggcctggaatatgcctgttcagggaacagcggcggacctcatgaagatcgccatggtgaaattgtttccgcgcttgaaacccttaggagcccaccttcttctgcaggtgcatgatgaaattgtcttggaagtacccgaggatcgcgcagaagaagccaaagcactcgtgaaagaggttatggaaaacgcgtatccgttagatgttccgttggaggtcgaagtgggtgtaggccgtgattggcttgaagcgaaacaagactaatga

SEQ ID NO: 1374 - protein, 844 aa, synthetic construct
  REGION 1..844: note = DNA Polymerase Variant
MHHHHHHGGSGMLPLFDLEEPPKRVLLVDGHHLAYRTFYALSLTTSRGEPTQMVYGFARSLLKALKEDGQAVVVVFDAKAPSFRHEAYEAYKAGRAPTPEDFPRQLALVKRLVDLLGLVRLEAPGYEADDVLGTLAKKAEREGMEVHILTGDRDFFQLLSEKVSVLLPDGTLVTPKDVQEKYGVPPERWVDFRALTGDRSDNIPGVAGIGEKTALRLLAEWGSVENLLKNLDRVKPDSLRRKIEAHLEDLILSLDLVRIRTDLPLEVDFKALRRRTPDLEGLRAFLEELELGSLLHEFGLLGGEKPREEAPWPPPEGAFVGFLLSRKEPMWAELLALAAAAEGRVHRATSPVEALADLKEARGFLAKDLVVLALREGVALDPTDDPLLVAYLLDSANTNPERVARRYGGEFTEDAAERALLSERLFQTLFPRLSEKLLWLYQEVERPLSRVLAHMEARGVRLDVPLLEALSFEAAKELERLEGEVFRLAGHPFNLNSRDQLEKVLFDKLGLTPVTRTEKTGKRSTSAAALEALRGVHPIVELILQYRELSKLKSTYLDRLPRLVHPRTGRLHTRFNQTATATGRLSSSDPNLQNIPVRTPLGMHIRKAFVAEEGWLLLAADYSQIELRVLAHLSGDENLKRVFREGKDIHTETAAWMFGVDSALVDPKMRRAAKTVNFGVLYGMSAARLSQELGIDYKEAEAFIERYFQSFPKVRAWIERTLEEGRTRGYVETLFGRRRYVPDLTSRVRSVREAAERMAWNMPVQGTAADLMKIAMVKLFPRLKPLGAHLLLQVHDEIVLEVPEDRAEEAKALVKEVMENAYPLDVPLEVEVGVGRDWLEAKQD

SEQ ID NO: 1375 - DNA, 2538 bp, synthetic construct
  misc_feature 1..2538: note = DNA Polymerase Variant
  source 1..2538: mol_type = other DNA
atgcaccatcatcatcatcatggcggtagcggcatgttaccgctgtttgatttggaagaaccaccaaaacgcgtgctgcttgttgacggccatcatctggcgtatcgtaccttctacgcactgagccttacgacctcacgtggtgagcctgtccagatggtgtatgggtttgctcgctccctgctgaaagccctgaaggaaggcggtcaagccgtagtagtggttttcgataacaaggcaccgtcgtttcgtcacgaagcgtacgaggcctataaagctggccgcgcaccgaccccggaagactttccgcgtcagttagcgctcgtcaaacgcctcgtggatttgctgggattagttcgcttggaagctcctggctacgaggcggacgacgtgctcggtacactggccaagaaagcagaacgtgaaggcatggaggtccatattcttaccggtgatcgcgatttcttccagctgctgtctgagaaagtgagcgttttgctgcccgatggcacgttagtaaccccgaaagatgtgcaagagaaatatggagttccgccagaacgttgggtggactttcgcgcactgactggtgatcgttcagacaacatcccgggcgttgccgggattggtgaaaagacggcgctgcgcctgctggcagaatggggctcggtggaaaatctgctcaagaaccttgatcgtgtgaaacctgatagcttacgccgcaagatcgaagcccacctggaagacttgattctgagtctggatcttgtacgtattcgcaccgatctgccgttggaagtagactttaaagctctgcgtcgtcgcacacccgatttagaggggttacgcgcgttcctcgaagaactggagctgggctccctgctgcatgaattcggtttgttgggcggagagaaaccgcgtgaagaagcaccatggccgccgcccgagggtgcctttgtcggctttcttctgtcacgcaaagagccaatgtgggcggaactgttagctcttgcagccgccgcggaagggcgtgttcaccgcgcgacctctcctgtcgaggccctcgctgacctcaaagaagcacgtggtttcttggcgaaagatttagtcgtgcttgcattacgcgaaggcgttgcgctcgatccgacggacgacccgcttttggtggcttatttgctcgatagcgcgaataccaacccggaacgtgtcgcccgtcgttacggcggcgagtttacggaagatgcggcagaacgcgcgttgcttagcgaacgcctcttccagacgttatttccacgtctttcggagaaattactctggctctatcaggaagtcgaacgtccattgagtcgcgtgcttgcccatatggaggctcgcggtgtgcgcttagatgttccgttgttagaagcactcagcttcgaggcggcaaaagaactggaacgtcttgaaggcgaagtctttcgtttagcggggcatcccttcaatctcaactctcgcgaccaattggagaaagtgctctttgatgaattaggtttaacccctgtcacgcgtacagagaagaccggcaaacgttccacttcggcagccgccttggaagcacttcgtggtgtgcacccgatcgtcgagttgattttgcagtatcgcgagctcagcaaactcaaatcaacctatcttgataggttacctcgtcttgttcatccacgtacgggtcgtttacacacccgcttcaatcaaacggcaacagccaccgggcgcttgtcgtcgagtgacccgaacctccagaatattccagtgcgcacgccgctgggcatgcacattcgtaaagcgtttgttgcggatgaaggttggttattacttgcggccgattactcccagatcgaacttcgtgtattggcgcatctctctggcgacgagaatcttaaacgcgtgtttcgcgaaggcaaggatattcacactgaaaccgcagcctggatgttcggggtggactcggccttagtggaccccaagatgcgtcgtgccgccaagaccgtcaactttggcgtactctatggtatgtcagcagcacgtcttagtcaggaattgggcattgacctgaaagaagctgaagcgtttatcgagcgctatttccaatcctttccgaaagttcgcgcgtggattgaacgtacgctcgaagaaggtcgcactcgcggctatgtggaaacgttattcgggcgtcgtcgctacgttccagatcttacgtctcgtgtccgctcagtgcgcgaagctgctgagcgtatggcctggaatatgcctgttcagggaacagcggcggacctcatgaagatcgccatggtgaaattgtttccgcgcttgaaacccttaggagcccaccttcttctgcaggtgcatgatgaactggtcttggaagtacccgaggatcgcgcagaagaagccaaagcactcgtgaaagaggttatggaaaacgcgtatccgttagatgttccgttggaggtcgaagtgggtgtaggccgtgattggcttgaagcgaaacaagactaatga

SEQ ID NO: 1376 - protein, 844 aa, synthetic construct
  REGION 1..844: note = DNA Polymerase Variant
MHHHHHHGGSGMLPLFDLEEPPKRVLLVDGHHLAYRTFYALSLTTSRGEPVQMVYGFARSLLKALKEGGQAVVVVFDNKAPSFRHEAYEAYKAGRAPTPEDFPRQLALVKRLVDLLGLVRLEAPGYEADDVLGTLAKKAEREGMEVHILTGDRDFFQLLSEKVSVLLPDGTLVTPKDVQEKYGVPPERWVDFRALTGDRSDNIPGVAGIGEKTALRLLAEWGSVENLLKNLDRVKPDSLRRKIEAHLEDLILSLDLVRIRTDLPLEVDFKALRRRTPDLEGLRAFLEELELGSLLHEFGLLGGEKPREEAPWPPPEGAFVGFLLSRKEPMWAELLALAAAAEGRVHRATSPVEALADLKEARGFLAKDLVVLALREGVALDPTDDPLLVAYLLDSANTNPERVARRYGGEFTEDAAERALLSERLFQTLFPRLSEKLLWLYQEVERPLSRVLAHMEARGVRLDVPLLEALSFEAAKELERLEGEVFRLAGHPFNLNSRDQLEKVLFDELGLTPVTRTEKTGKRSTSAAALEALRGVHPIVELILQYRELSKLKSTYLDRLPRLVHPRTGRLHTRFNQTATATGRLSSSDPNLQNIPVRTPLGMHIRKAFVADEGWLLLAADYSQIELRVLAHLSGDENLKRVFREGKDIHTETAAWMFGVDSALVDPKMRRAAKTVNFGVLYGMSAARLSQELGIDLKEAEAFIERYFQSFPKVRAWIERTLEEGRTRGYVETLFGRRRYVPDLTSRVRSVREAAERMAWNMPVQGTAADLMKIAMVKLFPRLKPLGAHLLLQVHDELVLEVPEDRAEEAKALVKEVMENAYPLDVPLEVEVGVGRDWLEAKQD

SEQ ID NO: 1377 - DNA, 2538 bp, synthetic construct
  misc_feature 1..2538: note = DNA Polymerase Variant
  source 1..2538: mol_type = other DNA
atgcaccatcatcatcatcatggcggtagcggcatgttaccgctgtttgatttggaagaaccaccaaaacgcgtgctgcttgttgacggccatcatctggcgtatcgtaccttctacgcactgagccttacgacctcacgtggtgagcctacgcagatggtgtatgggtttgctcgctccctgctgaaagccctgaaggaaactggtcaagccgtagtagtggttttcgatgcgaaggcaccgtcgtttcgtcacgaagcgtacgaggcctataaagctggccgcgcaccgaccccggaagactttccgcgtcagttagcgctcgtcaaacgcctcgtggatttgctgggattagttcgcttggaagctcctggctacgaggcggacgacgtgctcggtacactggccaagaaagcagaacgtgaaggcatggaggtccatattcttaccggtgatcgcgatttcttccagctgctgtctgagaaagtgagcgttttgctgcccgatggcacgttagtaaccccgaaagatgtgcaagagaaatatggagttccgccagaacgttgggtggactttcgcgcactgactggtgatcgttcagacaacatcccgggcgttgccgggattggtgaaaagacggcgctgcgcctgctggcagaatggggctcggtggaaaatctgctcaagaaccttgatcgtgtgaaacctgatagcttacgccgcaagatcgaagcccacctggaagacttgattctgagtctggatcttgtacgtattcgcaccgatctgccgttggaagtagactttaaagctctgcgtcgtcgcacacccgatttagaggggttacgcgcgttcctcgaagaactggagctgggctccctgctgcatgaattcggtttgttgggcggagagaaaccgcgtgaagaagcaccatggccgccgcccgagggtgcctttgtcggctttcttctgtcacgcaaagagccaatgtgggcggaactgttagctcttgcagccgccgcggaagggcgtgttcaccgcgcgacctctcctgtcgaggccctcgctgacctcaaagaagcacgtggtttcttggcgaaagatttagtcgtgcttgcattacgcgaaggcgttgcgctcgatccgacggacgacccgcttttggtggcttatttgctcgatagcgcgaataccaacccggaacgtgtcgcccgtcgttacggcggcgagtttactgaagatgcggcagaacgcgcgttgcttagcgaacgcctcttccagacgttatttccacgtctttcggagaaattactctggctctatcaggaagtcgaacgtccattgagtcgcgtgcttgcccatatggaggctcgcggtgtgcgcttagatgttccgttgttagaagcactcagcttcgaggcggcaaaagaactggaacgtcttgaaggcgaagtctttcgtttagcggggcatcccttcaatctcaactctcgcgaccaattggagaaagtgctctttgatgaattaggtttaacccctgtcacgcgtacagagaagaccggcaaacgttccacttcggcagccgccttggaagcacttcgtggtgtgcacccgatcgtcgagttgattttgcagtatcgcgagctcagcaaactcaaatcaacctatcttgataggttacctcgtcttgttcatccacgtacgggtcgtttacacacccgcttcaatcaaacggcaacagccaccgggcgcttgtcgtcgagtgacccgaacctccagaatattccagtgcgcacgccgctgggcatgcacattcgtaaagcgtttgttgcggaagaaggttggttattacttgcggccgattactcccagatcgaacttcgtgtattggcgcatctctctggcgacgagaatcttaaacgcgtgtttcgcgaaggcaaggatattcacactgaaaccgcagcctggatgttcggggtggactcggccttagtggaccccaagatgcgtcgtgccgccaagaccgtcaactttggcgtactctatggtatgtcagcagcacgtcttagtcaggaattgggcattgactacaaagaagctgaagcgtttatcgagcgctatttccaatcctttccgaaagttcgcgcgtggattgaacgtacgctcgaagaaggtcgcactcgcggctatgtggaaacgttattcgggcgtcgtcgctacgttccagatcttacgtctcgtgtccgctcagtgcgcgaagctgctgagcgtatggcctggaatatgcctgttcagggaacagcggcggacctcatgaagatcgccatggtgaaattgtttccgcgcttgaaacccttaggagcccaccttcttctgcaggtgcatgatgaattggtcttggaagtacccgaggatcgcgcagaagaagccaaagcactcgtgaaagaggttatggaaaacgcgtatccgttagatgttccgttggaggtcgaagtgggtgtaggccgtgattggcttgaagcgaaacaagactaatga

SEQ ID NO: 1378 - protein, 844 aa, synthetic construct
  REGION 1..844: note = DNA Polymerase Variant
MHHHHHHGGSGMLPLFDLEEPPKRVLLVDGHHLAYRTFYALSLTTSRGEPTQMVYGFARSLLKALKETGQAVVVVFDAKAPSFRHEAYEAYKAGRAPTPEDFPRQLALVKRLVDLLGLVRLEAPGYEADDVLGTLAKKAEREGMEVHILTGDRDFFQLLSEKVSVLLPDGTLVTPKDVQEKYGVPPERWVDFRALTGDRSDNIPGVAGIGEKTALRLLAEWGSVENLLKNLDRVKPDSLRRKIEAHLEDLILSLDLVRIRTDLPLEVDFKALRRRTPDLEGLRAFLEELELGSLLHEFGLLGGEKPREEAPWPPPEGAFVGFLLSRKEPMWAELLALAAAAEGRVHRATSPVEALADLKEARGFLAKDLVVLALREGVALDPTDDPLLVAYLLDSANTNPERVARRYGGEFTEDAAERALLSERLFQTLFPRLSEKLLWLYQEVERPLSRVLAHMEARGVRLDVPLLEALSFEAAKELERLEGEVFRLAGHPFNLNSRDQLEKVLFDELGLTPVTRTEKTGKRSTSAAALEALRGVHPIVELILQYRELSKLKSTYLDRLPRLVHPRTGRLHTRFNQTATATGRLSSSDPNLQNIPVRTPLGMHIRKAFVAEEGWLLLAADYSQIELRVLAHLSGDENLKRVFREGKDIHTETAAWMFGVDSALVDPKMRRAAKTVNFGVLYGMSAARLSQELGIDYKEAEAFIERYFQSFPKVRAWIERTLEEGRTRGYVETLFGRRRYVPDLTSRVRSVREAAERMAWNMPVQGTAADLMKIAMVKLFPRLKPLGAHLLLQVHDELVLEVPEDRAEEAKALVKEVMENAYPLDVPLEVEVGVGRDWLEAKQD

SEQ ID NO: 1379 - DNA, 19 bp, synthetic construct
  misc_feature 1..19: note = F1 Primer
  source 1..19: mol_type = other DNA
ccaatacgcaaaccgcctc

SEQ ID NO: 1380 - DNA, 21 bp, synthetic construct
  misc_feature 1..21: note = R1 Primer
  source 1..21: mol_type = other DNA
caacggtggtatatccagtga
